(19) United States
(12) Patent Application Publication
(10) Pub. No.: US 2002/0182599 A1
(43) Pub. Date: Dec. 5, 2002

(54) Methods for diagnosing and treating heart disease

(76) Inventor: Mark C. Fishman, Newton Center, MA (US)

Correspondence Address: Karen L. Elbing, Ph.D., Clark & Elbing LLP, 176 Federal Street, Boston, MA, 02110, US

(21) Appl. No.: 09/759,508

(22) Filed: Jan. 12, 2001

Related U.S. Application Data
(60) Provisional application No. 60/175,787, filed on Jan. 12, 2000.

(51) Int. Cl. C12Q 1/68; C12P 19/34

(52) U.S. Cl. 435/6; 435/91.2

(57) ABSTRACT

The invention provides methods of diagnosing heart disease, such as heart failure, screening methods for identifying compounds that can be used to treat or to prevent heart disease, and methods of using these compounds to treat or to prevent heart disease. The invention also provides animal model systems for carrying out the screening methods.

### CROSS REFERENCE TO RELATED APPLICATIONS

[0001] This application claims priority from U.S. provisional patent application 60/175,786, filed Jan. 12, 2000.

### FIELD OF THE INVENTION

[0002] This invention relates to methods for diagnosing and treating heart disease.

### BACKGROUND OF THE INVENTION

[0003] Heart disease is a general term used to describe many different heart conditions. For example, coronary artery disease, which is the most common heart disease, is characterized by constriction or narrowing of the arteries supplying the heart with oxygen-rich blood, and can lead to myocardial infarction, which is the death of a portion of the heart muscle. Heart failure is a condition resulting from the inability of the heart to pump an adequate amount of blood through the body. Heart failure is not a sudden, abrupt stop of heart activity, but, rather, typically develops slowly over many years, as the heart gradually loses its ability to pump blood efficiently. Risk factors for heart failure include coronary artery disease, hypertension, valvular heart disease, cardiomyopathy, disease of the heart muscle, obesity, diabetes, and a family history of heart failure.

### SUMMARY OF THE INVENTION

[0004] The invention provides diagnostic, drug screening, and therapeutic methods based on the observation that mutation of the titin gene leads to a phenotype in zebrafish that is similar to mammalian heart failure.

[0005] In one aspect, the invention provides a method of determining whether a test subject (e.g., a mammal, such as a human) has, or is at risk of developing, a titin-related disease or condition (e.g., heart failure). This method involves analyzing a nucleic acid molecule of a sample from the test subject to determine whether the test subject has a mutation (for example, a mutation in a cardiac-specific exon, such as the N2B exon; e.g., the pickwick mutation; see below) in a titin gene. The presence of such a mutation is an indication that the test subject has, or is at risk of developing, a titin-related disease. This method can further involve using nucleic acid molecule primers specific for the titin gene for nucleic acid molecule amplification of the titin gene by the polymerase chain reaction, or sequencing titin nucleic acid molecules from the test subject.

[0006] In another aspect, the invention provides a screening method for identifying a compound that can be used to treat or to prevent heart failure. This method involves contacting an organism (e.g., a zebrafish) having a titin mutation (for example, a mutation in a cardiac-specific exon, such as the N2B exon; e.g., the pickwick mutation) and a phenotype characteristic of heart failure with the compound, and determining the effect of the compound on the phenotype. Detection of an improvement in the phenotype indicates the identification of a compound that can be used to treat or to prevent heart failure.

[0007] In another aspect, the invention provides a method of treating or preventing heart disease, such as heart failure, in a patient. This method involves administering to the patient a compound identified using the screening method described above. A patient treated using this method can have a mutation in the titin gene.

[0008] In a further aspect, the invention provides a non-human animal (e.g., a zebrafish or a mouse) that has a mutation in a titin gene. The mutation can be, for example, in a cardiac-specific exon of the titin gene, such as the N2B exon, and can result in production of a truncated titin product, for example, by the introduction of a stop codon.

[0009] By “polypeptide” or “polypeptide fragment” is meant a chain of two or more amino acids, regardless of any post-translational modification (e.g., glycosylation or phosphorylation), constituting all or part of a naturally or non-naturally occurring polypeptide. By “post-translational modification” is meant any change to a polypeptide or polypeptide fragment during or after synthesis. Post-translational modifications can be produced naturally (such as during synthesis within a cell) or generated artificially (such as by recombinant or chemical means). A “protein” can be made up of one or more polypeptides.

[0010] By “titin,” “titin protein,” or “titin polypeptide” is meant a polypeptide that has at least 45%, preferably at least 60%, more preferably at least 75%, and most preferably at least 90% amino acid sequence identity to the sequence of the human (see below) or the zebrafish titin polypeptides. Polypeptide products from splice variants of titin gene sequences and titin genes containing mutations are also included in this definition. A titin polypeptide as defined herein plays a role in heart development, modeling, structure, and contractility. It can be used as a marker of heart disease, such as heart failure.

[0011] By a “titin nucleic acid molecule” is meant a nucleic acid molecule, such as a genomic DNA, cDNA, or RNA (e.g., mRNA) molecule, that encodes titin, a titin protein, a titin polypeptide, or a portion thereof, as defined above.

[0012] The term “identity” is used herein to describe the relationship of the sequence of a particular nucleic acid molecule or polypeptide to the sequence of a reference molecule of the same type. For example, if a polypeptide or nucleic acid molecule has the same amino acid or nucleotide residue at a given position, compared to a reference molecule to which it is aligned, there is said to be “identity” at that position. The level of sequence identity of a nucleic acid molecule or a polypeptide to a reference molecule is typically measured using sequence analysis software with the default parameters specified therein, such as the introduction of gaps to achieve an optimal alignment (e.g., Sequence Analysis Software Package of the Genetics Computer Group, University of Wisconsin Biotechnology Center, 1710 University Avenue, Madison, Wis. 53705, BLAST, or PILEUP/PRETTYBOX programs). These software programs match identical or similar sequences by assigning degrees of identity to various substitutions, deletions, or other modifications. Conservative substitutions typically include substitutions within the following groups: glycine, alanine, valine, isoleucine, and leucine; aspartic acid, glutamic acid, asparagine, and glutamine; serine and threonine; lysine and arginine; and phenylalanine and tyrosine.

[0013] A nucleic acid molecule or polypeptide is said to be “substantially identical” to a reference molecule if it exhibits, over its entire length, at least 51%, preferably at least 55%, 60%, or 65%, and most preferably 75%, 85%, 90%, or 95% identity to the sequence of the reference molecule. For polypeptides, the length of comparison sequences is at least 16 amino acids, preferably at least 20 amino acids, more preferably at least 25 amino acids, and most preferably at least 35 amino acids. For nucleic acid molecules, the length of comparison sequences is at least 50 nucleotides, preferably at least 60 nucleotides, more preferably at least 75 nucleotides, and most preferably at least 110 nucleotides.

[0014] A titin nucleic acid molecule or titin polypeptide is “analyzed” or subject to “analysis” if a test procedure is carried out on it that allows the determination of its biological activity or whether it is wild type or mutated. For example, one can analyze the titin genes of an animal (e.g., a human or a zebrafish) by amplifying genomic DNA of the animal using the polymerase chain reaction, and then determining whether the amplified DNA contains a mutation, for example, the pickwick mutation, by, e.g., nucleotide sequence or restriction fragment analysis.

[0015] By “probe” or “primer” is meant a single-stranded DNA or RNA molecule of defined sequence that can base pair to a second DNA or RNA molecule that contains a complementary sequence (“target”). The stability of the resulting hybrid depends upon the extent of the base pairing that occurs. This stability is affected by parameters such as the degree of complementarity between the probe and target molecule, and the degree of stringency of the hybridization conditions. The degree of hybridization stringency is affected by parameters such as the temperature, salt concentration, and concentration of organic molecules, such as formamide, and is determined by methods that are well known to those skilled in the art. Probes or primers specific for titin nucleic acid molecules, preferably, have greater than 45% sequence identity, more preferably at least 55-75% sequence identity, still more preferably at least 75-85% sequence identity, yet more preferably at least 85-99% sequence identity, and most preferably 100% sequence identity to the sequences of human (see below) or zebrafish titin.

[0016] Probes can be detectably-labeled, either radioactively or non-radioactively, by methods that are well-known to those skilled in the art. Probes can be used for methods involving nucleic acid hybridization, such as nucleic acid sequencing, nucleic acid amplification by the polymerase chain reaction, single stranded conformational polymorphism (SSCP) analysis, restriction fragment polymorphism (RFLP) analysis, Southern hybridization, northern hybridization, in situ hybridization, electrophoretic mobility shift assay (EMSA), and other methods that are well known to those skilled in the art.

[0017] A molecule, e.g., an oligonucleotide probe or primer, a gene or fragment thereof, a cDNA molecule, a polypeptide, or an antibody, can be said to be “detectably-labeled” if it is marked in such a way that its presence can be directly identified in a sample. Methods for detectably-labeling molecules are well known in the art and include, without limitation, radioactive labeling (e.g., with an isotope, such as ³²P or ³⁵S) and nonradioactive labeling (e.g., with a fluorescent label, such as fluorescein).

[0018] By a “substantially pure polypeptide” is meant a polypeptide (or a fragment thereof) that has been separated from proteins and organic molecules that naturally accompany it. Typically, a polypeptide is substantially pure when it is at least 60%, by weight, free from the proteins and naturally-occurring organic molecules with which it is naturally associated. Preferably, the polypeptide is a titin polypeptide that is at least 75%, more preferably at least 90%, and most preferably at least 99%, by weight, pure. A substantially pure titin polypeptide can be obtained, for example, by extraction from a natural source (e.g., isolated heart tissue), by expression of a recombinant nucleic acid molecule encoding a titin polypeptide, or by chemical synthesis. Purity can be measured by any appropriate method, e.g., by column chromatography, polyacrylamide gel electrophoresis, or HPLC analysis.

[0019] A polypeptide is substantially free of naturally associated components when it is separated from those proteins and organic molecules that accompany it in its natural state. Thus, a protein that is chemically synthesized or produced in a cellular system different from the cell in which it is naturally produced is substantially free from its naturally associated components. Accordingly, substantially pure polypeptides not only include those derived from eukaryotic organisms, but also those synthesized in E. coli or other prokaryotes.

[0020] An antibody is said to “specifically bind” to a polypeptide if it recognizes and binds to the polypeptide (e.g., a titin polypeptide), but does not substantially recognize and bind to other molecules (e.g., non-titin related polypeptides) in a sample, e.g., a biological sample that naturally includes the polypeptide.

[0021] By “high stringency conditions” is meant conditions that allow hybridization comparable with the hybridization that occurs using a DNA probe of at least 500 nucleotides in length, in a buffer containing 0.5 M NaHPO₄, pH 7.2, 7% SDS, 1 mM EDTA, and 1% BSA (fraction V), at a temperature of 65° C., or a buffer containing 48% formamide, 4.8× SSC, 0.2 M Tris-Cl, pH 7.6, 1× Denhardt's solution, 10% dextran sulfate, and 0.1% SDS, at a temperature of 42° C. (These are typical conditions for high stringency northern or Southern hybridizations.) High stringency hybridization is also relied upon for the success of numerous techniques routinely performed by molecular biologists, such as high stringency PCR, DNA sequencing, single strand conformational polymorphism analysis, and in situ hybridization. In contrast to northern and Southern hybridizations, these techniques are usually performed with relatively short probes (e.g., usually 16 nucleotides or longer for PCR or sequencing and 40 nucleotides or longer for in situ hybridization). The high stringency conditions used in these techniques are well known to those skilled in the art of molecular biology, and examples of them can be found, for example, in Ausubel et al., Current Protocols in Molecular Biology, John Wiley & Sons, New York, N.Y., 1998, which is hereby incorporated by reference.

[0022] By “sample” is meant a tissue biopsy, amniotic fluid, cell, blood, serum, urine, stool, or other specimen obtained from a patient or test subject. The sample can be analyzed to detect a mutation in a titin gene, or expression levels of a titin gene, by methods that are known in the art. For example, methods such as sequencing, single-strand conformational polymorphism (SSCP) analysis, or restriction fragment length polymorphism (RFLP) analysis of PCR products derived from a patient sample can be used to detect a mutation in a titin gene; ELISA can be used to measure levels of titin polypeptide; and PCR can be used to measure the level of a titin nucleic acid molecule.

[0023] By “titin-related disease” or “titin-related condition” is meant a disease or condition that results from inappropriately high or low expression of a titin gene, or a mutation in a titin gene that alters the biological activity of a titin nucleic acid molecule or polypeptide. Titin-related diseases and conditions can arise in any tissue in which titin is expressed during prenatal or post-natal life. Titin-related diseases and conditions can include heart diseases, such as heart failure. Specific examples of different types of heart failure are provided below.

[0024] The invention provides several advantages. For example, using the diagnostic methods of the invention, it is possible to detect an increased likelihood of heart disease, such as heart failure, in a patient, so that appropriate intervention can be instituted before any symptoms occur. This may be useful, for example, with patients in high-risk groups for heart failure (see above). Also, the diagnostic methods of the invention facilitate determination of the etiology of an existing heart condition, such as heart failure, in a patient, so that an appropriate approach to treatment can be selected. In addition, the screening methods of the invention can be used to identify compounds that can be used to treat or to prevent heart conditions, such as heart failure.

[0025] Other features and advantages of the invention will be apparent from the following detailed description and the claims.

### BRIEF DESCRIPTION OF THE DRAWING

[0026] FIG. 1 is a schematic representation of the domain structure of the human titin filament. The nucleotide and amino acid sequences of human titin are provided in SEQ ID NOs:1 and 2, respectively. The modular architecture of cardiac titin as predicted by its full-length cDNA is shown.

[0027] A total of 244 copies of 100 residue repeats, as indicated by vertical rectangles, are contained in the molecule. One hundred and twelve of these belong to the Ig domain, and 132 belong to the FN3 superfamily. The titin kinase domain, as well as the PEVK element N2-B 163-residue variant are also shown. Within the A-band, the D-zone contains six tandem repeats of the seven domains shown (A1 through A42), and the C-zone contains 11 tandem repeats of the 11 domains shown (A43 through Al 63). The positions of the tandemly repeated RMSP and VKSP motifs in the Z-disc and M-line region are also shown

### DETAILED DESCRIPTION

[0028] The invention provides methods of diagnosing heart disease, screening methods for identifying compounds that can be used to treat or to prevent heart disease, and methods of treating or preventing heart disease using these compounds. The invention also provides animal model systems that can be used in the screening methods of the invention.

[0029] In particular, we have discovered that a mutation (the pickwick mutation) in the titin gene is associated with heart disease, such as heart failure. Titin, which is also known as “connectin,” is the largest known single-chain protein, having a molecular weight of about 3,000 kDa. Titin is a structural protein, and plays a central role in the assembly and elasticity of vertebrate skeletal and cardiac muscle. Thus, the diagnostic methods of the invention involve detection of mutations in the titin gene, while the compound identification methods of the invention involve screening for compounds that affect the phenotype of titin mutants or other models of heart disease, such as heart failure. Compounds identified in this manner can be used in methods to treat or to prevent heart disease (e.g., heart failure). The diagnostic, screening, and therapeutic methods of the invention, as well as the animal model systems of the invention, are described further, as follows.

[0030] Diagnostic Methods

[0031] Titin nucleic acid molecules, polypeptides, and antibodies can be used in methods to diagnose or to monitor diseases and conditions involving mutations in, or inappropriate expression of, titin genes. As discussed further below, the pickwick mutation in zebrafish, which is present in the titin gene, is characterized by a phenotype that is similar to that of heart failure in humans. Thus, detection of abnormalities in titin genes or their expression can be used in methods to diagnose, or to monitor treatment or development of, human heart disease, such as heart failure. For use as references, the human cardiac titin cDNA sequence can be found at: http://www.embl-heidelberg.de/Extemallnfo/Titin/cardiacseq.html (SEQ ID NO:1), while the corresponding protein sequence can be found at: http://www.embl-heidelberg.de/Extemallnfo/Titin/cardiacpep.html (SEQ ID NO:2).

[0032] As noted above, the diagnostic methods of the invention can be used, for example, with patients that have heart failure, in an effort to determine its etiology and, thus, to facilitate selection of an appropriate course of treatment. The diagnostic methods can also be used with patients that have not yet developed heart failure, but who are at risk of developing such a disease, or with patients that are at an early stage of developing such a disease. Also, the diagnostic methods of the invention can be used in prenatal genetic screening, for example, to identify parents who may be carriers of a recessive titin mutation.

[0033] Examples of heart failure that can be diagnosed (and treated) using the methods of the invention include congestive heart failure, which is characterized by fluid in the lungs or body, resulting from failure of the heart in acting as a pump; right sided heart failure (right ventricular), which is characterized by failure of the pumping action of the right ventricle, resulting in swelling of the body, especially the legs and abdomen; left sided heart failure (left ventricular), which is caused by failure of the pumping action of the left side of the heart, resulting in congestion of the lungs; forward heart failure, which is characterized by the inability of the heart to pump blood forward at a sufficient rate to meet the oxygen needs of the body at rest or during exercise; backward heart failure, which is characterized by the ability of the heart to meet the needs of the body only if heart filling pressures are abnormally high; low-output, which is characterized by failure to maintain blood output; and high-output, which is characterized by heart failure symptoms, even when cardiac output is high.

[0034] Titin may also play a role in cardiovascular diseases other than heart failure, such as coronary artery disease or conditions associated with valve formation defects, and, thus, detection of abnormalities in titin genes or their expression can be used in methods to diagnose and monitor these conditions as well. The methods of the invention can be used to diagnose (or to treat) the disorders described herein in any mammal, for example, humans, domestic pets, or livestock.

[0035] Titin abnormalities that can be detected using the diagnostic methods of the invention include those characterized by, for example, (i) abnormal titin polypeptides, (ii) titin genes containing mutations that result in the production of such polypeptides, and (iii) titin mutations that result in production of abnormal amounts of titin. Detection of such abnormalities, thus, can be used in methods to diagnose human heart disease, such as heart failure. Exemplary of the titin mutations that can be detected using the methods of the invention is the pickwick mutation (see below).

[0036] Detection of titin mutations can be carried out using any diagnostic technique. For example, a biological sample obtained from a patient can be analyzed for one or more mutations in titin nucleic acid molecules (e.g., the pickwick mutation) using a mismatch detection approach. Generally, this approach involves polymerase chain reaction (PCR) amplification of nucleic acid molecules from a patient sample, followed by identification of a mutation (i.e., a mismatch) by detection of altered hybridization, aberrant electrophoretic gel migration, binding, or cleavage mediated by mismatch binding proteins, or by direct nucleic acid molecule sequencing. Any of these techniques can be used to facilitate detection of mutant titin genes, and each is well known in the art. Examples of these techniques are described by Orita et al. (Proc. Natl. Acad. Sci. U.S.A. 86:2766-2770, 1989) and Sheffield et al. (Proc. Natl. Acad. Sci. U.S.A. 86:232-236, 1989).

[0037] Mutation detection assays also provide an opportunity to diagnose a titin-mediated predisposition to heart disease before the onset of symptoms. For example, a patient heterozygous for a titin mutation that suppresses normal titin biological activity or expression may show no clinical symptoms of a titin-related disease, and yet possess a higher than normal probability of developing heart disease, such as heart failure. Given such a diagnosis, a patient can take precautions to minimize exposure to adverse environmental factors, and can carefully monitor their medical condition, for example, through frequent physical examinations. As mentioned above, this type of diagnostic approach can also be used to detect titin mutations in prenatal screens.

[0038] The titin diagnostic assays described above can be carried out using any biological sample (for example, a muscle tissue sample) in which titin is normally expressed. Because of the limited number of tissues in which titin is expressed, as well as the relative difficulties involved in obtaining samples of these tissues, it may be preferable to detect mutant titin genes in another, more easily obtained sample type, such as blood or amniotic fluid samples using, for example, mismatch detection techniques. Preferably, the DNA in such a sample is subjected to PCR amplification prior to analysis.

[0039] Levels of titin expression in a patient sample can be determined by using any of a number of standard techniques that are well known in the art. For example, titin expression in a biological sample (e.g., a blood or tissue sample, or amniotic fluid) from a patient can be monitored by standard northern blot analysis or by quantitative PCR (see, e.g., Ausubel et al., supra; PCR Technology: Principles and Applications for DNA Amplification, H. A. Ehrlich, Ed., Stockton Press, NY; Yap et al., Nucl. Acids. Res. 19:4294, 1991).

[0040] In yet another diagnostic approach of the invention, an immunoassay is used to detect or to monitor titin protein levels in a biological sample. Titin-specific polyclonal or monoclonal antibodies can be used in any standard immunoassay format (e.g., ELISA, Western blot, or RIA; see, e.g., Ausubel et al., supra) to measure titin polypeptide levels. These levels are compared to wild-type titin levels. For example, a decrease in titin production may be indicative of a condition or a predisposition to a condition involving insufficient titin biological activity.

[0041] Immunohistochemical techniques can also be utilized for titin detection. For example, a tissue sample can be obtained from a patient, sectioned, and stained for the presence of titin using an anti-titin antibody and any standard detection system (e.g., one that includes a secondary antibody conjugated to horseradish peroxidase). General guidance regarding such techniques can be found in, e.g., Bancroft et al., Theory and Practice of Histological Techniques, Churchill Livingstone, 1982, and in Ausubel et al., supra.

[0042] Identification of Molecules That Can Be Used to Treat or to Prevent Heart Failure

[0043] Identification of a mutation in titin as resulting in a phenotype that is related to heart failure facilitates the identification of molecules (e.g., small organic molecules, peptides, or nucleic acid molecules) that can be used to treat or to prevent heart failure. The effects of candidate compounds on heart failure can be investigated using, for example, the zebrafish system. The zebrafish, Danio rerio, is a convenient organism to use in genetic analysis of vascular development. In addition to its short generation time and fecundity, it has an accessible and transparent embryo, allowing direct observation of blood vessel function from the earliest stages. As discussed further below, zebrafish and other animals having mutations in the titin gene, which can be used in these methods, are also included in the invention.

[0044] In one example of the screening methods of the invention, a zebrafish having a mutation in the titin gene (e.g., a zebrafish having the pickwick mutation; see below) is contacted with a candidate compound, and the effect of the compound on the development of a heart abnormality that is characteristic of heart failure, or on the status of such an existing heart abnormality, is monitored, relative to an untreated, identically mutant control. As discussed further below, zebrafish having the pickwick mutation are characterized by, for example, reduction of peak systolic pressures, stretched and thin myocardium, excess cardiac jelly, absent A-V cushions, and an obstructed ventricular outflow tract. Thus, these characteristics (in addition to other characteristics of heart failure) can be monitored using the screening methods of the invention.

[0045] After a compound has been shown to have a desired effect in the zebrafish system, it can be tested in other models of heart disease, for example, in mice or other animals having a mutation in the titin gene. Alternatively, testing in such animal model systems can be carried out in the absence of zebrafish testing.

[0046] Candidate compounds can be purified (or substantially purified) molecules or can be one component of a mixture of compounds (e.g., an extract or supernatant obtained from cells; Ausubel et al., supra). In a mixed compound assay, the effect on a phenotype of heart failure is tested against progressively smaller subsets of the candidate compound pool (e.g., produced by standard purification techniques, e.g., HPLC or FPLC) until a single compound or minimal compound mixture is demonstrated to have the desired effect.

[0047] Test compounds that can be screened in the methods described above can be chemicals that are naturally occurring or artificially derived. Such compounds can include, for example, polypeptides, synthesized organic molecules, naturally occurring organic molecules, nucleic acid molecules, and components thereof Candidate compound can be found, for example, in a cell extract, mammalian serum, or growth medium in which mammalian cells have been cultured.

[0048] In general, novel drugs for prevention or treatment of mutant titin-related heart diseases can be identified from large libraries of both natural products, synthetic (or semi-synthetic) extracts, and chemical libraries using methods that are well known in the art. Those skilled in the field of drug discovery and development will understand that the precise source of test extracts or compounds is not critical to the screening methods of the invention. Accordingly, virtually any number of chemical extracts or compounds can be screened using these methods. Examples of such extracts or compounds include, but are not limited to, plant-, fungal-, prokaryotic-, or animal-based extracts, fermentation broths, and synthetic compounds, as well as modifications of existing compounds.

[0049] Numerous methods are also available for generating random or directed synthesis (e.g., semi-synthesis or total synthesis) of any number of chemical compounds, including, but not limited to, saccharide-, lipid-, peptide-, and nucleic acid molecule-based compounds. Synthetic compound libraries are commercially available from Brandon Associates (Merrimack, N.H.) and Aldrich Chemical (Milwaukee, Wis.). Alternatively, libraries of natural compounds in the form of bacterial, fungal, plant, and animal extracts are commercially available from a number of sources, including Biotics (Sussex, UK), Xenova (Slough, UK), Harbor Branch Oceanographic Institute (Ft. Pierce, Fla.), and PharmaMar, U.S.A. (Cambridge, Mass.). In addition, natural and synthetically produced libraries can be produced, if desired, according to methods known in the art, e.g., by standard extraction and fractionation. Furthermore, if desired, any library or compound can be readily modified using standard chemical, physical, or biochemical methods.

[0050] In addition, those skilled in the art of drug discovery and development readily understand that methods for dereplication (e.g., taxonomic dereplication, biological dereplication, and chemical dereplication, or any combination thereof) or the elimination of replicates or repeats of materials already known for their therapeutic activities for heart failure can be employed whenever possible.

[0051] When a crude extract is found to have an effect on the development or persistence of heart failure, further fractionation of the positive lead extract can be carried out to isolate chemical constituents responsible for the observed effect. Thus, the goal of the extraction, fractionation, and purification process is the careful characterization and identification of a chemical entity within the crude extract having a desired activity. The same assays described herein for the detection of activities in mixtures of compounds can be used to purify the active component and to test derivatives of these compounds. Methods of fractionation and purification of such heterogeneous extracts are well known in the art. If desired, compounds shown to be useful agents for treatment can be chemically modified according to methods known in the art.

[0052] Treatment or Prevention of Heart Failure

[0053] Compounds identified using the screening methods described above can be used to treat patients that have or are at risk of developing heart disease, such as heart failure. Such treatment may be required only for a short period of time, or may, in some form, be required throughout a patient's lifetime. Any continued need for treatment, however, can be determined using, for example, the diagnostic methods described above. In considering various therapies, it is understood that such therapies are, preferably, targeted to the affected or potentially affected organ, that is, the heart.

[0054] Treatment or prevention of diseases resulting from a mutated titin gene can be accomplished, for example, by modulating the function of a mutant titin protein, delivering normal titin protein to the appropriate cells, altering the levels of normal or mutant titin protein, replacing a mutant titin gene with a normal titin gene or, administering a normal titin gene. It is also possible to correct a titin defect by modifying the physiological pathway (e.g., a signal transduction pathway) in which the titin protein participates.

[0055] In a patient diagnosed as heterozygous for a titin mutation, or as susceptible to titin mutations or aberrant titin expression (even if those mutations or expression patterns do not yet result in alterations in titin expression or biological activity), any of the above-described therapies can be administered before the occurrence of the disease phenotype. In particular, compounds shown to modulate titin expression or to have an effect on the phenotype of titin mutants can be administered to patients diagnosed with potential or actual heart disease by any standard dosage and route of administration.

[0056] Any appropriate route of administration can be employed to administer a compound found to be effective in treating or preventing heart failure, according to the invention. For example, administration can be parenteral, intravenous, intra-arterial, subcutaneous, intramuscular, intraventricular, intracapsular, intraspinal, intracisternal, intraperitoneal, intranasal, aerosol, or oral. However, as noted above, preferably, the administration is local to the afflicted tissue, that is, the heart. Therapeutic formulations can be in the form of liquid solutions or suspensions; for oral administration, formulations can be in the form of tablets or capsules; and for intranasal formulations, in the form of powders, nasal drops, or aerosols.

[0057] A therapeutic compound of the invention can be administered within a pharmaceutically acceptable diluent, carrier, or excipient, in unit dosage form. Administration can begin before or after the patient is symptomatic. Methods that are well known in the art for making formulations are found, for example, in Remington's Pharmaceutical Sciences, (18^{th} edition), ed. A. Gennaro, 1990, Mack Publishing Company, Easton, Pa. Formulations for parenteral administration can, for example, contain excipients; sterile water; or saline; polyalkylene glycols, such as polyethylene glycol; oils of vegetable origin; or hydrogenated napthalenes. Biocompatible, biodegradable lactide polymer, lactide/glycolide copolymer, or polyoxyethylene-polyoxypropylene copolymers can be used to control the release of the compounds. Other potentially useful parenteral delivery systems for compounds identified using the methods of the invention include ethylene-vinyl acetate copolymer particles, osmotic pumps, implantable infusion systems, and liposomes. Formulations for inhalation can contain excipients, for example, lactose, or can be aqueous solutions containing, for example, polyoxyethylene-9-lauryl ether, glycocholate, and deoxycholate, or can be oily solutions for administration in the form of nasal drops, or as a gel.

[0058] Titin nucleic acid molecules and polypeptides can also be used in tissue engineering, for example, in the manufacture of artificial or partially artificial hearts. As mentioned above, titin plays a role in cardiovascular elasticity, integrity, and contractility. Thus, a titin nucleic acid molecule or polypeptide, as described above, can be used to impart such characteristics on an artificial or partially artificial heart.

[0059] Animal Model Systems

[0060] The invention also provides animal model systems for use in carrying out the screening methods described above. Examples of these model systems include zebrafish and other animals, such as mice, that have mutations in a titin gene. For example, a zebrafish model that can be used in the invention can include a mutation that results in a lack of titin production or production of a truncated (e.g., by introduction of a stop codon) or otherwise altered titin gene product. The mutation can, for example, result in the presence of a stop codon in a cardiac-specific exon, such as the N2B exon (e.g., in the IS3 region; see below). The mutation can be in a region encoding the I band, resulting in the production of a protein in which the I band is truncated and the A band and M line are absent, or can be in a region encoding another portion of the molecule, such as the A band or M line region. As a specific example, a zebrafish having the pickwick mutation can be used.

[0061] Experimental Results

[0062] During a large-scale mutagenesis screening of the zebrafish genome, a group of mutations were identified that affect cardiac contractility. One of these mutations, called pickwick (pik), dramatically reduces the function of both chambers, causing a recessive, lethal form of heart failure in the zebrafish embryo.

[0063] Direct in vivo recording of ventricular pressures by the null balance feedback system shows that pickwick causes a 5.8 fold reduction of peak systolic pressures, compared to age-matched controls (0.084+/−0.008 vs. 0.49+/−0.06 mm Hg). Morphological analysis of pickwick revealed a stretched and thin myocardium, excess cardiac jelly, absent A-V cushions, and an obstructed ventricular outflow tract. Extensive ultrastructural defects were found by transmission electron microscopy, affecting the assembly of Z-discs and the organization of myofilaments. Reciprocal blastomere transplants identified pickwick as a cell autonomously acting mutation of the myoblast lineage.

[0064] A positional cloning approach was adopted for gene identification. The pickwick mutation has been assigned to a small chromosomal interval, which is covered by BAC clones. The titin gene spans this interval, and thus the pickwick phenotype is due to a mutation in the titin gene. In particular, the pickwick gene was mapped to linkage group (LG) 9 by bulk segregant analysis using the pikm242 allele, which is one of five cardiac specific alleles (pikm242, pikm171, pikm740, pikm186,pikmnm2). A panel of Z-markers in the linkage group was tested for simple sequence length polymorphisms (SSLPs) using 931 homozygous mutant embryos. Markers Z8363 and Z26463 were shown to flank the pickwick locus, defining a 1.2 cM interval containing the gene. It is estimated that 1 cM corresponds to 500-600 kb DNA in the zebrafish genome (Postlethwait et al., Science 264:699-703, 1994). We thus initiated chromosomal walking from the Z8363 marker, which is 0.7 cM from the mutation (12 recombinants out of 1750 meioses).

[0065] A positive YAC clone (YAC5) was identified that had a T7 end that is highly homologous to human titin coding sequences. As the titin genomic region was estimated to be over 300 kb in humans, we decided to identify BAC clones based on sequence information of the zebrafish titin EST clones. A physical contig was constructed based on these sequences, which covers the whole titin genomic area. Single stranded conformational polymorphisms (SSCPs) were developed from the ends and internal sequences of these clones were used for fine recombinational mapping. One SSCP marker inside the titin genomic area (B9F2) picked up one recombinant from the Z26463 side. The other four SSCP markers inside the titin genomic area (B4SP1, B2T7, B7SP, and B6SP) picked up zero recombinants out of 1750 meioses. These genetic data indicated that the pickwick locus is very close to or within the titin genomic region.

[0066] As the titin cDNA alone is around 82 kb, rescuing the phenotype by RNA injection could prove to be quite difficult. However, we found evidence that the pickwick locus is within the titin gene by identification of point mutations in one of the pickwick alleles. As most of the alleles of pickwick have a cardiac-specific phenotype, we presumed that the point mutation is located in a cardiac-specific exon. We focused on the N2B domain in the I-band of titin, as all of the cardiac isoforms are N2B domain based. The zebrafish N2B domain was cloned by RT-PCR. It is a 4.3 kb cDNA encoding infrastructures similar to those in humans and mice, and contains 4 IG repeats and three unique sequences, including longer IS3 and shorter IS1.

[0067] N2B domains from pickwick mutant embryos were then cloned. RNA mismatch analysis was performed to identify the location of the point mutation. One mismatch between the PCR products from pikm171 and pikm242 was identified. Sequencing of the PCR product resulted in the identification of a T→G transition in the pikm171 allele. This mutation resulted in a change of leucine in the IS3 fragment of N2B domain (N2B-IS3) into a stop codon. The mutation was confirmed in all of the seven homozygous pikm171 mutant embryos, but none of the four pikm242 homozygous embryos. A truncated version of titin is predicted to be in the pikm171 mutant, only as a cardiac specific isoform. It should contain the Z-disc and part of the I-band and be sized around 4,000 amino acids, based on comparison to the homologous human titin sequence, which has a full length of 27,000 amino acids. The identification of a non-sense mutation in the cardiac specific N2B domain in pikm171 allele confirmed the hypothesis that titin is the pickwick gene.

[0068] Titin was expressed in the zebrafish embryo during the period when the pickwick phenotype was first detected. Whole mount in situ hybridization analysis indicated that titin was expressed strongly in both the heart and the somites at 24 hpf. Titin mRNA expression in the heart is normal in pikm171. We confirmed the notion that N2B is a cardiac-specific exon in zebrafish by labeling a probe in the IS3 domain for the whole mount in situ hybridization.

[0069] The identification of a point mutation in the N2B domain thus establishes pickwick as the first in vivo vertebrate system to study the functions of titin in the heart. If titin functions as a spring, as proposed, it is expected that the contraction will be much weaker. This is exactly what we observed in pickwick mutant embryos. If titin functions as a template during the sarcomere assembly, a “silent heart” phenotype would be expected in titin null mutation. According to the current model of the myofibrillogenesis (Dabiri et al., Proc. Natl. Acad. Sci. U.S.A. 94:9493-9498, 1997), the thick element and/or the sarcomere could not assemble into a beating machine. In contrast, the hearts in the homozygous pikm171 mutant embryos and all of the other pickwick alleles still beat, despite being weaker.

[0070] The mutation in pikm171 predicts a truncated protein in which most of the elastic I-band is deleted and the C-terminal A-band and M-line regions eliminated. It thus could be considered as a null mutation in terms of function as a spring and a potential dominant negative mutation in terms of its function as a template for sarcomere assembly (Turnacioglu et al., Mol. Biol. Cell 8:705-717, 1997). The observation of the weak beating in the pickwick mutant embryos suggested the existence of primary contractile machinery without titin. Indeed, thick and thin elements can be detected in the ventricular myocardium cells. They have the capacity to assemble into a functional beating structure in the absence of titin.

[0071] We thus have carried out a detailed physiological and morphological analysis of pickwick, a zebrafish heart function mutation that reduces the contractility of both chambers. Several pieces of evidence pointed out that titin is the pickwick gene. Genetic analysis linked the pickwick locus closely to the titin genomic area. The identification of the pikmVO62H, a pickwick allele that has an additional somite phenotype, can be explained by the titin hypothesis. The point mutation is expected to be in the common exons that are shared between the cardiac and somatic isoforms of titin. Evidence confirming this hypothesis came from the identification of a point mutation in the cardiac specific N2B domain of titin in one of the pickwick alleles, pikm171. We went on to show that sarcomere structure is disrupted in the myocardium cells of pikm171, but not the somatic muscle cells. The expression pattern of titin is consistent with this phenotype. Strong expression in both cardiac and skeletal muscles was detected at the onset of the pickwick phenotype.

[0072] Thus, our observation in zebrafish is in consistent with the notion that titin functions as a spring during the muscle contraction. As titin is a sarcomere structure protein, it is conceivable that myocardium is affected cell-autonomously in pickwick mutant embryos. The thin and stretched morphology could be due to the mechanic tension generated from the failure to form higher-order sarcomere structure and the loss of spring. The mechanic tension may also be the reason for the separation between the myocardium cells and endocardium cells, generating the excess cardiac jelly. However, there is a possibility that the differentiation program of the myocardium was affected in the titin mutation. The valve formation phenotype in pickwick mutant embryos could be a secondary defect. It has been suggested that the process of endothelial invasion during valve formation is under control of a localized myocardial signal. (For a review, see Fishman et al., Development 124:2099-2117, 1997.) The physical distance between myocardium and endocardium and/or the stalked differential program in the myocardium could be the reason that prevents a normal cushion formation.

[0073] Material and Methods

[0074] Zebrafish Strains and Maintenance

[0075] Zebrafish were maintained and staged as described. pikm242, pikm171, pikm740, pikm186 were generated in a screen on the AB background (Stainier et al., Development 123:285-292, 1996). pikmVO62H and pikmnml2 were generated in a screen on the TL background. Mapping strains were constructed by crossing pikm242 into india strain. pikm171 embryos used in expression analysis and EM were obtained from pair wise matings of pikm171/TL heterozygotes.

[0076] In situ Hybridization

[0077] Whole mount in situ hybridization was performed as described (Thisse et al., Development 119:1203-1215, 1993). T5 probe was generated by digestion of the EST clone A1629069 (Research Genetics). The N2B and N2A probe were generated through PCR with a tagged T7 promoter. The primer pairs are:

| | | |
|---|---|---|
| P238F: | 5′-AGGGACACTCAGAGACCATAG | (SEQ ID NO:3); and |
| P3785RT: | 5′-TAATACGACTCACTATAGGGGTCTGAGGATACTCGCCTTC | (SEQ ID NO:4). |

[0078] Mapping of Pickwick

[0079] Linkage was established using DNA from 16 homozygous mutations and 16 heterozygous or wild type pick pikm242/indian embryos in bulk segregation analysis (Michelmore et al., Proc. Natl. Acad. Sci. U.S.A. 88:9828-9832, 1991). Z-markers (simple sequence length polymorphisms, SSLP) were developed in this lab (Knapik et al., Nat. Genet. 18:338-343, 1998; Shimoda et al., Genomics 58:219-232, 1999). Genotyping products were resolved in 6% PAGE gels.

[0080] Chromosomal Walking

[0081] YAC and BAC clones were screened by PCR as pools of clones (Research Genetics) according to the manufacturer's instruction. YAC ends were cloned by plasmid rescue (Zhong et al., Genomics 48:136-138, 1998). Chimeric ends were determined by the RH panel (Geisler et al., Nat. Genet. 23:86-89, 1999). BAC DNA was extracted using the QIAgene kit and the end sequences were determined by direct sequencing. BLAST-X was performed to search for homologous sequence in Genebank. EST clones were generated by Washington University zebrafish EST project and obtained from Research Genetics. Oligonucleotides derived from the end sequences of YAC and BAC clones were used in standard PCR reactions to determine clone overlap. Primer pair B9F2 was derived from a fragment that was generated by digesting BAC5 with BamHI and then subcloning into the pUC19 vector. This clone can be hit by a primer pair derived form the T7 end of BAC7. Single-strand conformation polymorphisms (SSCP) were tested on 6% MDE acrylamide (FMC Bioproducts) gels at 40° C.

[0082] Cloning of the Zebrafish N2B Domain

[0083] Long RT-PCR was performed to amplify the N2B domain from adult zebrafish heart mRNA extracts. mRNA was extracted from pools of ten zebrafish adult hearts using TRIzole reagent (GibcolBRL), as described. The cDNA was synthesized using SuperScripTMII RNase H-Reverse Transcriptase (GibcoBRL) and then treated with RNase H. The primer is derived from EST3: I19R1: 5′-TTTGAACCACTTGAAGGTCACACCAGG (SEQ ID NO:5). Long-PCR was performed using Expand 20 kbPlus PCR System (Roch) as described. The primer pairs are:

| | |
|---|---|
| I14F1: | |
| 5′-GCTAAGAATGACTATGGAGTTGCCACAAGC | (SEQ ID NO:6) |
| I19R2: | |
| 5′-TGAACCACTTGAAGGTCACACCAGGAG | (SEQ ID NO:7) |

[0084] The 4.6 kb product was subcloned using TOPO TA Cloning Kit (Invitrogen) as described. The sequence was determined by primer walking. Forty eight reads were aligned by Phred/Phrad software to get a large contig that contains only one reading frame with around three fold coverage.

[0085] To amplify the N2B region from the homozygous mutant zebrafish embryos, three overlapping primer pairs were designed according to the adult N2B sequence. The contamination from the skeletal muscle specific titin isofoirm was thus eliminated. mRNA was extracted from pools of ten zebrafish day 2 embryos using TRIzole reagent (GibcoBRL) as described. Sequencing results indicated that the embryonic heart titin contain one less IG domain in the area.

[0086] Identification of the Point Mutation

[0087] N2B domains from the homozygous mutant embryos were further amplified by primer pairs that generate six overlapping PCR products sized between 0.6 kb and about 1 kb. RNA mismatch analysis was performed using MutationScreenerTM (Ambion) according to the manufacture's protocol. A mismatch was identified between pikm171 and pikm242 using the primer pairs:

| | | |
|---|---|---|
| P238FT: | 5′-TAATACGACTCACTATAGGGAGGGACACTCAGAGACCATAG | (SEQ ID NO:8) |
| P3785RT: | 5′-TAATACGACTCACTATAGGGGTCTGAGGATACTCGCCTTC | (SEQ ID NO:9). |

[0088] Sequencing results indicate a T→G non-sense mutation in the cDNA from homozygous pikm171 embryos. Genomic sequence in this region was amplified using the primer pair:

| | | |
|---|---|---|
| P238F: | 5′-AGGGACACTCAGAGACCATAG | (SEQ ID NO:10) |
| P341R: | 5′-GGCAATGTTACTCTCTGTTGAG | (SEQ ID NO:11) |

[0089] and sent out directly for sequencing after purification using the Geneclean Spin Kit (BIO101).

[0090] Electron Microscopy

[0091] Forty eight hour embryos were fixed overnight at 4° C. in 1.5% glutaraldehyde, 1% paraformaldehyde, 70 mM NaPO₄ pH 7.2, 3% Sucrose. They were then washed 3 times for 5 minutes each in 0.1M cacodylate buffer, pH 7.4.

[0092] Other Embodiments

[0093] Although the present invention has been described with reference to preferred embodiments, one skilled in the art can easily ascertain its essential characteristics and without departing from the spirit and scope thereof, can make various changes and modifications of the invention to adapt it to various usages and conditions. Those skilled in the art will recognize or be able to ascertain using no more than routine experimentation, many equivalents to the specific embodiments of the invention described herein. Such equivalents are intended to be encompassed in the scope of the present invention.

[0094] All publications and patents mentioned in this specification are hereby incorporated by reference.

What is claimed is:

1. A method of determining whether a test subject has, or is at risk of developing, a titin-related disease or condition, said method comprising analyzing a nucleic acid molecule of a sample from the test subject to determine whether the test subject has a mutation in a titin gene, wherein the presence of said mutation is an indication that said test subject has, or is at risk of developing, a titin-related disease.

2. The method of claim 1, further comprising the step of using nucleic acid molecule primers specific for the titin gene for nucleic acid molecule amplification of the titin gene by the polymerase chain reaction.

3. The method of claim 1, further comprising the step of sequencing titin nucleic acid molecules from said test subject.

4. The method of claim 1, wherein said test subject is a mammal.

5. The method of claim 1, wherein said test subject is human.

6. The method of claim 1, wherein said disease or condition is heart failure.

7. The method of claim 1, wherein said mutation is the pickwick mutation.

8. A method for identifying a compound that can be used to treat or to prevent heart failure, said method comprising contacting an organism comprising a titin mutation and having a phenotype characteristic of heart failure with said compound, and determining the effect of said compound on said phenotype, wherein detection of an improvement in said phenotype indicates the identification of a compound that can be used to treat or to prevent heart failure.

9. The method of claim 8, wherein said organism is a zebrafish.

10. The method of claim 8, wherein said titin mutation is the pickwick mutation.

11. A method of treating or preventing heart failure in a patient, said method comprising administering to said patient a compound identified using the method of claim 8.

12. The method of claim 11, wherein said patient has a mutation in the titin gene.

13. The method of claim 12, wherein said mutation is the pickwick mutation.

14. A non-human animal comprising a mutation in a titin gene.

15. The non-human animal of claim 14, wherein the non-human animal is a zebrafish.

16. The non-human animal of claim 14, wherein the mutation is in a cardiac-specific exon of said titin gene.

17. The non-human animal of claim 16, wherein the mutation is in the N2B exon of said titin gene.

18. The non-human animal of claim 14, wherein the mutation results in the presence of a stop codon in said titin gene.

19. The non-human animal of claim 14, wherein the mutation is the pickwick mutation.

The application's sequence listing, which the Patent Office published only in electronic form, follows.

SEQUENCE LISTING (11 sequences)

SEQ ID NO: 1 - DNA, 81940 bp, Homo sapiens
  CDS (133)..(80910)
attagaggctcaccgattcatgtcggagatggtcagaaaaaccaactctccataggacgtcgtttcagaagcaaccttgggcttagtcccaccctttttaggcactcttgagaaatcagagtgcctagaaagatgacaactcaagcaccgacgtttacgcagccgttacaaagcgttgtggtactggagggtagtaccgcaacctttgaggctcacattagtggttttccagttcctgaggtgagctggtttagggatggccaggtgatttccacttccactctgcccggcgtgcagatctcctttagcgatggccgcgctaaactgacgatccccgccgtgactaaagccaacagtggacgatattccctgaaagccaccaatggatctggacaagcgactagtactgctgagcttctcgtgaaagctgagacagcaccacccaacttcgttcaacgactgcagagcatgaccgtgagacaaggaagccaagtgagactccaagtgagagtgactggaatccctacacctgtggtgaagttctaccgggatggagccgaaatccagagctcccttgatttccaaatttcacaagaaggcgacctctacagcttactgattgcagaagcataccctgaggactcagggacctattcagtaaatgccaccaatagcgttggaagagctacttcgactgctgaattactggttcaaggtgaagaagaagtacctgctaaaaagacaaagacaattgtttcgactgctcagatctcagaatcaagacaaacccgaattgaaaagaagattgaagcccactttgatgccagatcaattgcaacagttgagatggtcatagatggtgccgctgggcaacagctgccacataaaacacctcccaggattcctccgaagccaaagtcaagatccccaacaccaccgtctattgctgccaaagcacagctggctcggcagcagtccccatcgcccataagacactccccttccccggtcagacacgtgcgggcaccgaccccatctccggtcaggtccgtgtctccagcagcaagaatctccacatcccccatcaggtctgttaggtctccattgctcatgcgtaagactcaggcatccaccgtggccacaggtcctgaagtgcctcccccttggaagcaagagggctacgtggcctcctcatctgaggctgagatgagagagacaacgctgacaacctctactcagatcaggacagaagagagatgggaagggagatacggtgtccaggagcaagtgaccatcagtggtgctgcgggtgctgccgccagtgtgtcggccagtgctagctacgcagcagaggctgttgccactggtgctaaagaggtgaaacaagatgctgacaaaagtgcagctgttgcgactgttgttgctgccgttgatatggccagagtgagagaaccagtgatcagcgctgtagagcagactgctcagaggacaaccacgactgctgtgcacatccaacctgctcaagaacaggtaagaaaggaagcggagaagactgctgtaactaaggtagtagtggccgccgataaagccaaggaacaagaattaaaatcaagaaccaaagaaataattaccacaaagcaagagcagatgcacgtaactcatgagcagataagaaaagaaactgaaaaaacatttgtaccaaaggtagtaatttccgcagctaaagccaaagaacaagaaactagaatttctgaagaaattactaagaaacagaaacaagtaactcaagaagcaataatgaaggaaactaggaaaacagttgtacctaaagtcatagttgccacacccaaagtcaaagaacaagatttagtatcaagaggtagagaaggcattactaccaaaagagaacaagtgcaaataactcaggagaagatgagaaaggaagccgagaaaactgccttgtctacaatagcagttgctactgctaaagccaaagaacaagaaacaatactgagaactagagaaactatggctactagacaagaacaaatccaagttacccatggaaaggtggacgttggaaaaaaggctgaagctgtagcaacagttgttgctgcagtagaccaggcccgagtcagagagcccagagagcctgggcatcttgaagaatcctatgctcagcagaccactttggagtacggatataaggaacgcatttccgccgcaaaggtagctgagcctccccaacgtccagcctcagaaccccacgttgtccctaaagcagtcaagcctagagtaatccaggctccttctgagactcatatcaaaactactgatcaaaagggaatgcacatatcatcacagatcaagaaaactacagatctaacaacggaaagattagtccatgtggataaacgcccccgcacagctagccctcactttactgtttcaaaaatttctgttcctaagacagaacatggatatgaggcatcaatagccggtagtgctattgccacattacaaaaagagttgtcagccacatcttctgctcagaagatcaccaaatcggtgaaggctcctactgtgaagcccagtgagactagagtaagggcagagcccacacccttgccacagttccccttcgctgacacaccagatacttacaagagtgaagctggcgttgaggtgaaaaaggaagtaggggtgagcatcactggcaccaccgtccgtgaagagcgctttgaagtactgcacggacgcgaagccaaggtaacagaaacagcaagagtaccagcacctgttgaaattcctgttactccaccaactttggtctcgggcttaaaaaatgtgactgtcatagaaggtgaatctgtcaccttggagtgccacatctctggatacccatccccgacagtgacatggtacagggaagactaccaaatcgaaagttccattgacttccagataaccttccagagtggaattgctcgtcttatgattcgcgaagcatttgcggaagacagcgggcgatttacttgcagtgctgtaaatgaggctggaaccgtcagcacatcctgctatctggctgtgcaggtgtcagaagaatttgaaaaggaaaccacagccgtgactgagaaatttactacagaagagaaacgctttgttgagtcaagagatgtggttatgactgatactagcctcacagaggaacaagcagggcctggagaacctgccgcgccttactttattacaaaaccagtggtccagaaactggtggaaggtgggagcgtggtgtttggatgccaagttggcggcaacccaaagccccatgtatactggaaaaaatctggtgttcctctaaccactggatacagatacaaagtgagttacaacaaacaaaccggtgaatgcaagctggtgatttctatgacttttgctgatgatgctggagaatacactattgttgttcgcaataagcatggagaaacttctgcatctgcttccttgcttgaagaagctgattatgagttactgatgaagtcccagcaagaaatgctttatcagacacaagtgactgcatttgttcaagaacctgaagttggagaaacagcacctggatttgtatactctgagtatgaaaaagagtatgaaaaagaacaagccttaattaggaagaaaatggccaaagatactgtagtggtcagaacttatgtagaagatcaggaattccatatttcttcctttgaagagagacttattaaagaaattgaatatagaataataaagactacattagaagaacttcttgaagaagatggagaagaaaagatggcagttgacatttctgaatctgaagctgttgaatcaggatttgatttaagaatcaagaattatagaattcttgaggggatgggtgtcacttttcattgcaagatgtctggatatccattaccaaagattgcttggtacaaagatggcaagcgcatcaaacatggagaaagataccaaatggactttctacaagatggcagagctagtctgcgtatacctgttgttcttccagaagatgaaggaatctacactgcatttgccagcaatattaaaggaaatgcaatttgctcagggaaattgtatgtggagcctgctgcaccacttggagctccgacttacattcccacactagagccagtgagcagaatcagatctctctctccacgttcagtgagcaggtctcctatacgcatgtctcctgcacggatgtcacctgcaaggatgtctcctgcacggatgtcccctgcaagaatgtcccctggacgtaggctggaggagacagatgagtcacaacttgagagactatataaaccagtctttgtgttaaaacctgtttctttcaaatgtttagaagggcaaactgccagatttgacttaaaggttgttggtagacctatgccagagacgttctggtttcatgatggccagcaaattgtcaatgactatacccataaagtagtcattaaagaagatggtactcaatcactaattattgtccctgccacacccagtgattctggggaatggactgtggttgcccaaaacagggcaggcagatcttcaatttcagtgattttaactgtggaagctgtggaacatcaggtaaaaccgatgtttgtagaaaaactgaaaaatgtcaatataaaggaaggttcccgacttgaaatgaaagtcagagctacgggtaaccccaaccctgacattgtatggttgaaaaacagtgacatcattgtgcctcataaatatcccaaaatcagaattgaaggaaccaagggagaagctgcccttaaaatcgattccactgtcagccaagattctgcctggtatactgcgactgctattaataaagctggcagagacactacaagatgcaaagtaaatgttgaagttgagtttgcagagcctgagccagagagaaagttaatcatcccacgggggacatatagagcaaaggagattgcagccccagaactggagcccctccatttgcgatatggccaagagcaatgggaagaaggtgatctctatgacaaagagaaacaacagaaaccatttttcaagaaaaaactcacttccttaagacttaagcgctttgggcctgcccactttgaatgcaggctaacacccattagtgacccaacgatggtggtggagtggctccatgatggaaagccacttgaagcagccaacaggctccgtatgatcaatgaatttgggtactgcagccttgattatggcgttgcatattctagagacagtggtatcattacttgcagagccactaacaaatatggaacagatcacacatctgctacccttattgttaaagatgagaaaagtcttgtggaagaatcccaattgcctgaggggaggaaaggcttacagagaattgaagaattagagagaatggctcatgaaggtgcacttacaggtgtaacaacagatcagaaagaaaagcaaaagccagacattgtcttgtacccagagccagttagagtacttgaaggggagactgcaaggttccgctgcagggtaacaggctaccctcagcccaaagtcaactggtacctcaatggacagctcatccgcaaaagcaaaaggttcagagttcgctatgatggtatccattacctggacatcgtggactgcaaatcatatgacacaggtgaagtgaaggtcaccgcggaaaatcctgaaggtgtgatagagcataaagtgaagcttgagattcaacagagggaagattttaggtctgtccttaggagagctcctgaaccaaggcctgagtttcacgtacatgaaccaggaaagcttcagtttgaagtacaaaaagtggatagacctgttgacaccactgaaaccaaagaagttgtgaagttgaaaagggctgaaagaattacccatgaaaaagtgcctgaagagtcggaagagctgcgcagtaaattcaagcgcagaacagaagagggctattatgaagccattaccgctgtggagctcaagtctcgaaagaaggatgaatcctatgaggaactcctcaggaagacaaaagatgaacttctccactggaccaaagagttaactgaagaggaaaagaaagctcttgccgaagaaggcaaaatcacgattccaacttttaaacctgacaagattgaactaagtcctagtatggaggctccaaaaatcttcgaaagaatccagagccaaacagtgggccaaggatctgatgcacacttccgggtcagagtcgtggggaaaccagaccccgaatgtgaatggtacaaaaatggtgtcaaaattgaacggtctgaccggatctactggtactggcccgaagacaatgtttgtgaattggtcataagagatgtgactgctgaggactctgccagcatcatggtaaaagccatcaacatagctggagaaacctccagtcacgcattcttacttgtccaagccaagcaattgatcactttcacacaggaattacaagatgttgttgctaaggaaaaagacactatggcaacctttgaatgtgaaacttcagaaccatttgtcaaagtgaaatggtataaagatggtatggaggttcatgagggagataaatacaggatgcactctgacagaaaggttcacttcctctccatactgaccattgatacgtctgatgctgaagattacagctgtgtacttgtggaagatgaaaatgtcaaaacgactgctaaacttattgttgaaggtgcagttgttgagtttgtgaaagaacttcaggacatagaagttccagaatcatattcaggagaattagagtgcattgtatccccagaaaatatagaaggaaaatggtatcataatgatgtggagcttaaatccaatggcaaatatacaattacatctcgtcgtggacgtcagaacctcacggtcaaggatgtaaccaaggaggaccagggagaatacagctttgtcatcgacgggaaaaagacaacctgtaaattaaagatgaaaccccgccccattgctatcctacaaggacttagtgaccaaaaagtctgtgagggtgacattgttcagcttgaagttaaagtctccttggaaagtgtggaaggcgtctggatgaaagacggccaagaagtgcagcccagtgacagggttcacattgtgatagacaaacaatctcatatgctgctcattgaagacatgactaaggaagatgctggaaattactctttcaccattccagcccttggcctctccaccagtgggcgtgtctctgtctatagtgtggacgtgataacacctctaaaagatgttaatgtgattgaaggcaccaaggctgtgcttgaatgtaaggtgtcagtccctgatgtgacttctgttaagtggtacttaaatgatgaacaaatcaagcctgatgaccgtgtacaggccattgtgaaaggtactaaacagcgactagtcattaaccgaactcatgcttcagacgaaggaccttataagctgatagttggcagagttgaaaccaactgtaatctctctgtagaaaaaattaaaattatcagaggtcttcgtgaccttacctgtacagaaactcaaaatgtggtgtttgaggttgagctgtcccactctggaattgatgtcctgtggaattttaaggacaaggaaatcaagcccagttctaaatataaaattgaagcacatggaaaaatatataaattgacagttctaaatatgatgaaagatgatgaaggaaaatacacattttacgcgggagaaaatatgacatctggaaaacttactgtggcaggtggggccatctccaagccactcacagatcagaccgtagctgaatcccaggaagctgtgtttgaatgtgaagttgccaacccagattccaaaggcgaatggttgagggatggcaaacacctaccactgactaacaacatcagaagtgagtctgatggccacaaaaggagacttatcattgctgccaccaaattagatgacattggagaatatacctacaaggtggccacctccaaaacatctgccaaactcaaagttgaagctgtcaaaattaagaagactctgaagaacctcacagtgacagaaacacaggatgctgttttcactgtcgagcttacacaccctaatgtcaaaggtgtccagtggatcaaaaatggagttgtgctggaatccaatgaaaagtatgctatctctgtcaaaggaacaatttactctctgaggattaaaaactgtgccatcgtggatgagtctgtttatggcttcaggcttggaaggcttggagccagtgccagactgcacgtggagactgtcaagatcattaaaaagccaaaggatgtgacagccttggaaaatgccactgttgcctttgaagttagtgtttcccatgacactgttccagtaaaatggttccataagagtgtggaaattaagccaagtgacaaacacagactggtctcagaaaggaaagtccacaagctgatgctgcagaacatctccccctcagatgctggggaatacacagctgtggtcgggcaattggaatgcaaagcaaaactgtttgtggagacattacatattacaaaaaccatgaaaaatatcgaggtgcctgagaccaaaactgcctcttttgagtgtgaggtgtcccacttcaatgtcccttccatgtggctgaagaatggtgtggaaattgagatgagtgaaaagttcaagatagttgtgcagggaaaactccatcagctgatcatcatgaacaccagcacagaggactcggcagaatacacatttgtctgtggcaatgaccaagtcagtgccaccctgacagtcactccaatcatgattacttccatgctgaaagacatcaacgctgaagaaaaagacactattacttttgaggtgacagtgaactatgaaggcatctcttacaaatggttaaagaatggtgtggaaatcaaatcaactgacaagtgccagatgagaaccaaaaagctcacacactcactgaacatcaggaatgttcactttggggatgctgctgactacacctttgtggctggaaaagcaacatcaacagccacactttatgtggaagctcgtcatatagaatttaggaaacacattaaggacattaaggtactggagaagaagcgagccatgtttgaatgtgaagtttctgaacctgacatcactgtacagtggatgaaagatgaccaggaactgcagatcacagacagaataaagattcagaaggagaaatatgtccaccgccttctgatcccatccacccggatgtctgatgctgggaagtacacagtggtggcaggaggcaacgtgtcaactgcaaaactctttgtagaaggcagagatgttcgcatccgaagtattaaaaaggaggttcaggtcattgagaaacagcgtgctgttgttgaatttgaggtcaatgaagacgatgttgatgcccactggtataaagatggcattgaaatcaatttccaagttcaagaacgacacaaatatgtagtggaaagaagaatccaccgaatgtttatctctgagaccagacagagcgatgcaggagaatacacctttgtggcaggaaggaacaggagttctgtcactctctatgtcaatgctcctgaaccgccccaagttctgcaggagctccagcctgtcactgtgcagtctggcaagcctgcccgcttctgtgccatgatatccggaagaccacagcccaaaatttcctggtacaaggaagagcagctgctttccactggcttcaagtgcaaatttcttcatgatgggcaagagtacacgcttttgctaattgaagccttcccagaggatgcggcagtctatacctgtgaagccaagaatgactatggtgttgccacaacatcagcttcactctcagtggaagttccagaagttgtgtctcctgatcaggaaatgcctgtttatccacctgccatcatcaccccgcttcaggacactgtcacttctgaagggcagccagcccgttttcaatgccgggtttctggaacagatctaaaagtgtcgtggtacagcaaagacaagaaaatcaagccatctcggttctttagaatgactcaatttgaagacacttatcaactggaaattgccgaagcttatccagaagatgaaggaacttacacgtttgttgctaataatgctgtaggccaagtatcaagcacagccaacctgagtctggaagctcctgaatcaattttgcatgagaggattgaacaagagattgagatggaaatgaaagagttttctagttcttttctgtctgccgaggaagaaggacttcatagcgccgaacttcaattatctaaaataaatgaaacacttgaacttttgtctgaatctccagtttacccaactaaatttgattccgaaaaggaaggcactggcccaattttcatcaaagaagtgtcaaatgctgatataagcatgggggatgtggctacactgtctgtaactgtcattggcatccccaaacctaaaattcagtggttctttaatggagtgctattaaccccttctgctgactacaaatttgtttttgacggtgatgatcatagcctgatcattctgttcaccaaattggaggatgagggagagtatacatgtatggccagtaatgactatggaaagacaatatgtagtgcctatctaaaaattaattccaaaggagagggtcacaaagacactgaaacagaatcagcagtggcaaaatctctggaaaagctgggaggtccttgtcctcctcacttccttaaggagttaaaaccaattcgctgtgctcaagggcttcctgccatctttgagtacacagtggttggagagcctgcccctactgttacatggttcaaagaaaacaagcagctttgcaccagtgtttattacactatcattcataaccctaatggctctggaactttcattgtcaatgaccctcagagggaagacagtggcctctatatctgtaaagcagagaatatgttgggtgagtccacctgtgcagcagagctgcttgtgcttctggaagacacagacatgactgataccccctgcaaagcaaagtccacaccagaggctcctgaggattttccacagacacccttaaagggtcccgcagttgaagcacttgactcggagcaggaaattgcaacgtttgtaaaagacaccattttgaaagctgctttaattacagaagaaaaccagcaactatcttatgagcatattgctaaagccaatgaattgagcagtcagcttcctttgggagctcaggaattgcaatccattttggagcaagacaagctcactcctgaaagcaccagggaatttctttgcatcaatggcagtattcactttcagcctctcaaggaaccatctcccaacctacagctgcagattgtacagtcccagaaaaccttctccaaagaaggtattctaatgcctgaagagcctgagacacaggcagttctatcagataccgagaaaatcttcccaagtgccatgtccatagaacaaattaattcattaacagttgagcctctgaaaactttattagctgaacctgaagggaattatccacagtcttcaatagaacctccaatgcattcttatctaacctctgtggctgaggaagtactttcactaaaagaaaagacagtatctgacaccaacagagagcaaagagtgactcttcaaaagcaagaggcacaaagtgcgctcatcttgagtcagagcttagctgagggacacgtggagagtctccagagtcctgatgtcatgatctctcaggtaaactatgagcccctagtcccttcagaacactcatgcacagaaggaggtaaaattttgatagaaagtgcaaatccactggaaaatgcagggcaagattctgcggtcagaattgaggaaggcaagtccttaagatttccactagcacttgaagaaaagcaggtactgctcaaagaagagcattctgacaacgtggtgatgcccccagaccaaatcattgagtctaaaagagagcccgtggcaataaagaaagtgcaggaggtacagggaagggaccttctttctaaggaaagcttgctttctggtattccagaagagcagagattaaacctgaaaattcaaatctgccgggctttgcaagcagccgtggccagcgagcagccaggtcttttctctgagtggctaagaaatattgaaaaggtggaggtcgaggctgtaaacatcacccaagagcccagacacatcatgtgcatgtaccttgttacttcggcaaagtctgtaacagaagaagtaaccatcattattgaagatgttgatcctcaaatggctaacctgaaaatggaacttagggatgctttgtgtgctattatatatgaggaaatagacatcctaacagctgagggtcctagaattcagcaaggagccaaaacaagtttgcaagaagaaatggattctttttcaggttcacagaaggttgaacccattactgaaccagaagttgaatctaaatatctgatctcaactgaagaggtcagttattttaacgtgcaaagtagggttaaatatttggatgccacacctgtcactaaaggggttgcttcagctgttgtctctgacgaaaaacaagatgagagtctgaaaccatcagaggaaaaagaggagtcttcctctgaaagtggtactgaggaggttgctacagtaaagatacaggaagctgagggtggcttaatcaaagaggatggccccatgatacatacacctttagtggacactgtttctgaggaaggtgatattgtacacctcacaacatccataacaaatgctaaagaggtgaattggtattttgagaataaactggtgccttcagatgaaaagttcaagtgtttacaagatcaaaatacatatacgctagtcatcgacaaagtaaataccgaagaccatcaaggagagtatgtctgtgaggccttgaatgacagcggaaaaacagcaacttcagccaaactcactgtagtaaaaagagctgccccagtgatcaagaggaaaatcgaacccctggaagtagcactgggccacctagccaaattcacctgtgagatccaaagtgctcccaatgtccggttccagtggtttaaagctggccgagaaatttatgagagtgacaagtgttctattcgatcttcaaagtatatctccagccttgaaatcctgagaacccaggtggttgactgcggcgagtatacatgcaaagcttccaatgagtatggcagtgtcagctgtacagccacactaactgtgacagtgcctggaggtgaaaagaaagttcgcaaattacttccggaacgtaaacctgaaccaaaggaagaagttgttctgaaaagcgttctaagaaaaagacctgaagaagaagaacctaaagtagaacctaaaaaactagaaaaagttaaaaaacctgcagtaccagaaccaccacctccaaaacctgttgaagaggttgaagtacctactgttacaaaaagggaaaggaagattcctgaaccaacaaaagtgcctgaaatcaagccagcaatacctctccctgcacctgaaccgaaaccaaagcccgaagcagaagtgaaaacaatcaaaccacctcctgtggaacctgaaccaacccccatcgctgccccagtaacagtgccagtggttggaaagaaagcagaagccaaagcacctaaggaagaggctgccaagccaaaaggtcctatcaaaggtgtacccaaaaagactccttcaccaatagaagccgaaaggagaaagttaaggccaggaagtggtggagagaaacctcctgatgaagccccgttcacctaccagctaaaggctgtgccactgaagtttgtgaaagaaatcaaagacatcatcttgacagaatcagagttcgttggctcttcagcaatctttgaatgtttggtctccccttccactgcaattacaacctggatgaaagacggtagcaatatccgtgagagtcccaagcacaggtttattgcagatggtaaagacagaaagctgcacatcattgatgttcaactttccgatgctggtgaatacacctgtgttttacgtttgggaaacaaagaaaagacctccacggctaaacttgttgtagaagaacttcctgtgcgttttgtaaaaacactggaagaggaagtcacagtggtcaaaggacagccattgtacttgagctgcgagttaaacaaagagcgtgacgtggtctggaggaaggatggcaagattgtggtggagaaacctggccgaattgtgccaggcgtcattggcttgatgcgggctctgaccatcaacgatgcagatgacacagatgctggaacatacacagttactgtggaaaacgccaacaacctggagtgttcatcttgcgtaaaagtagtagaagtcattagagattggctggtgaaacctatacgagaccagcatgtgaaacccaaggggacagctatttttgcctgtgatatagcaaaagatactccaaacattaagtggttcaaaggatatgatgaaatccctgcggaaccaaatgataagactgaaatactgagagatggaaatcatctgtacctcaaaattaagaatgctatgccagaagatattgctgagtatgcagtggaaattgaaggaaaaagataccctgcaaagctgacacttggagagcgtgaagttgaactgcttaaaccaatagaggacgttaccatttatgagaaagaaagtgcaagctttgatgcagaaatctcagaggcagacattcctggacaatggaaactgaaaggagaacttctaaggccctcacctacttgtgaaatcaaagcagaaggtggaaaacgcttcttaactttgcacaaagtcaaactggaccaagctggtgaagtcctctaccaggcccttaatgcaattacaactgccattttgacagtaaaagaaatcgaacttgactttgctgtgcccctgaaggatgtcactgttccagaaaggcgacaggctcgattcgaatgtgtcctcacccgagaggcaaatgttatatggtccaaaggacctgatataattaagtcatctgacaaatttgatatcatcgctgatggaaagaaacatattcttgttattaatgattctcaatttgatgatgaaggggtctatactgctgaggtggagggcaagaagacctcagctcggttgtttgtcacaggtataagactgaaattcatgtcacctcttgaagatcaaacagtaaaagaaggtgaaacagcaacttttgtttgtgaactttctcatgaaaaaatgcatgtagtctggttcaaaaatgatgccaaactccatacaagcagaacagtactcatctcttctgagggcaagactcacaaattggaaatgaaagaagtgacattggatgatatatctcagataaaagctcaagtcaaggagctgagctccacagcacagctgaaggtcttagaggccgatccctacttcactgtgaaattacatgacaaaactgcagtggagaaggatgagattactttgaagtgtgaagtgagcaaagatgtaccagtgaaatggttcaaagatggtgaagagattgtcccttcacccaaatattctatcaaggcagatggcctgcgccgcatcttaaaaatcaaaaaggcggaccttaaagataaaggcgaatatgtgtgtgactgtggcacagacaagaccaaggcaaatgttactgttgaggctcgactaatagaagtggaaaagcctctgtacggagtagaggtgtttgttggtgaaacagcccactttgaaattgaactttctgaacctgatgttcacggccagtggaagctgaaaggacagcctttgacagcttcccctgactgtgaaatcattgaggatggaaagaagcatattctgatccttcataactgtcagctgggtatgacaggagaggtttccttccaggctgctaatgccaaatctgcagccaatctgaaagtgaaagaattgcctcttatcttcatcacacctctcagtgatgttaaagtcttcgagaaagatgaggctaagtttgagtgtgaagtatccagggagcccaaaacattccgttggctaaaaggaacccaggaaatcacaggtgatgacagatttgagcttataaaggatggcactaagcattcaatggtgatcaagtcagctgcttttgaagatgaagcaaaatacatgtttgaagctgaagataagcacacaagtggcaaactgatcattgaaggaatccggctcaaattcctcacccctctcaaagatgtaactgccaaagagaaggaaagtgctgtatttactgtggagttatctcatgataacatccgagttaaatggttcaagaatgaccagcgcctacacaccaccaggtcggtctcaatgcaagacgaagggaaaactcattcgatcacattcaaagacctgtctattgatgacacctcccaaattagagtagaagctatggggatgagttcagaagctaaactcactgtgcttgagggagacccatattttacaggaaaacttcaagattatactggtgtagagaaagatgaagttattctacagtgtgaaattagcaaagcagatgcaccagtgaaatggtttaaggatgggaaggaaataaagccatccaaaaatgctgttattaagacagatggcaagaaacgcatgctaatcctaaagaaagccttgaaatcagatattggacagtacacctgtgactgtgggacagataagacctcaggaaaacttgacattgaggatcgggaaattaaactggtgcgacccctgcacagtgtggaggtgatggagactgagacagcacgctttgaaaccgaaatctctgaagatgatatccacgccaactggaaactcaagggagaggccctactccaaacacctgattgtgaaattaaggaagaaggcaaaatacactcccttgttttgcacaactgtcgcctggaccagacgggtggggtggatttccaagctgccaatgttaaatctagtgcccacctccgagttaagccacgagtaattggtcttctgaggcctttaaaggatgtcaccgtgactgcaggggaaacagccaccttcgactgcgagctctcctacgaagatatcccagtggaatggtatctcaaagggaagaaactagagcccagcgataaggtggtcccacgttcagaaggaaaagttcatacacttactctgagggatgtaaagttagaagatgctggggaagtccaactaacagcaaaagatttcaaaactcacgccaacctctttgtgaaagaacccccagttgaattcactaagcctcttgaggaccagacggtcgaagagggagccactgcagtgctggagtgtgaagtctccagagaaaatgctaaggtgaaatggttcaaaaatgggacagaaatcctcaaaagcaagaagtatgaaattgttgctgatggcagggtcagaaaacttgttatacatgactgtaccccagaggatattaaaacatacacttgtgatgctaaggattttaagacttcctgtaacctgaatgtcgtgcctcctcatgtggaattcttaagaccactcaccgaccttcaagttagagaaaaagaaatggctcgatttgagtgtgaactttcccgagaaaatgctaaggttaagtggtttaaagatggtgctgaaattaaaaagggcaaaaaatatgacatcatatccaagggagcagtgcgcattcttgtcatcaacaaatgtctactggatgatgaagctgaatattcctgtgaagtaaggacagcgagaacttctggcatgctgacagttctggaagaagaagctgtctttaccaaaaatcttgccaacattgaagttagtgaaacagacactataaaactggtttgtgaagtctccaaacctggcgcagaagtgatttggtataaaggggatgaggagatcattgaaacaggaagatatgaaatactgactgaaggacggaagagaatcctggtcattcagaacgctcaccttgaggatgctggcaactacaactgtcgactcccaagctctcgaaccgatggcaaagtcaaagtacatgaactggctgctgaatttatctcaaagcctcaaaaccttgaaatacttgaaggagaaaaggctgaatttgtctgctctatatcaaaagaaagctttccagtccagtggaagagggatgataagacacttgaatctggagataaatatgacgttattgctgatggtaaaaagagggtcctagttgtgaaagatgccacattacaagatatgggcacttacgttgtcatggtaggggccgccagagcagcagctcacttgacagtcattgaaaaactcaggatcgtagttcctcttaaggacacccgggtgaaggaacaacaggaagttgtcttcaactgtgaagtcaatactgaaggtgccaaagccaaatggttcagaaatgaagaagctatatttgatagttcaaaatacatcattctccaaaaagacctagtctacaccctcagaattagagatgcacacttagatgaccaagccaactataatgtgtctttgaccaatcacagaggtgaaaatgttaaaagtgcagccaatctaatagtagaagaggaagaccttaggattgttgagcctcttaaagatattgaaacaatggagaagaaatctgtcacattctggtgcaaggtgaatcgtctcaatgtaacactgaagtggaccaaaaatggtgaagaagtgccttttgacaaccgtgtctcatacagagttgataagtacaagcacatgttaaccattaaagactgtggcttcccagatgaaggtgaatacattgtcactgctggacaagataaatctgttgctgagcttctcatcatagaagccccgacagaatttgtggaacacttggaagatcagacagtcactgagttcgatgacgctgtcttctcctgccagctctccagagagaaagccaatgtaaaatggtacagaaatgggagagaaatcaaagaaggcaaaaaatacaaatttgaaaaagatggaagtatacacagactcattataaaagattgcaggctggatgatgagtgtgaatatgcttgcggggtagaagacaggaagtctcgtgctagactttttgtggaagaaattcctgttgagatcatcaggcctccacaagatattcttgaagcccctggtgctgatgttgtctttttagcagaactcaataaagataaggtggaagtccaatggctaagaaataacatggttgttgtccagggtgataaacaccagatgatgagtgaaggaaagatacatcgactacagatttgtgatattaagccccgtgaccagggtgaatacagatttattgccaaagacaaagaagccagagctaagcttgaactggcagctgcaccaaaaatcaagacagctgaccaagaccttgtggttgatgttggcaagcctctgacaatggtggtgccatatgatgcctaccccaaagcagaagctgaatggtttaaagaaaatgaacctttatctacaaaaaccattgatactacggctgaacaaacttctttcagaattttagaagccaagaaaggagacaaagggaggtataaaattgtgcttcagaacaaacatggaaaagcagaaggattcatcaatttaaaagttattgatgttcctgggccagtacgtaacttagaagtgacagaaacatttgatggtgaagtgagccttgcttgggaagaacctttaactgatggtggaagcaaaatcataggttacgttgttgaaagacgtgacattaagagaaagacctgggttctggccacagaccgtgcagagagttgtgagtttactgtcactggtctacagaaaggaggagttgagtacctattccgtgtgagtgcaagaaacagagttggcactggtgagccagtagaaactgacaatcctgtagaagcaaggagtaaatatgatgttccaggccctcctttgaatgtaaccatcactgatgtgaatcgatttggtgtctcactgacatgggaaccaccagagtatgatggaggtgctgagatcacaaactacgtcattgaattaagagacaagacttctatcaggtgggatactgccatgactgtgagagctgaagacctgtctgcaactgttactgatgtggtagaaggacaggagtacagtttccgagtgagagcccaaaatcgaattggagttggaaaaccaagtgcagccacacccttcgtcaaagttgctgatccaattgagagaccaagtcctcctgtaaacctaacttcctcagatcagactcagtcatcagttcagctcaaatgggaacctcctctgaaagatggaggaagcccaatattaggctatataattgagcgatgcgaagaaggaaaagataattggattcgttgcaatatgaaacttgtccctgaactgacttacaaggttaccggattggaaaaaggaaataaatatttatatagagtatctgcagaaaataaagctggtgtttcagatccatctgaaattcttggtcctctcaccgctgacgatgcatttgttgaaccaacaatggatttaagtgcatttaaagatggtctggaagttattgtcccaaatcctatcacgatcctggttccaagtacaggctatccaaggccaactgcaacctggtgttttggagataaagtactagaaacaggggaccgggtgaaaatgaagaccttgtctgcctatgccgaacttgtcatttctccaagtgaacgttcagacaagggcatttatacactgaaattagaaaaccgtgtgaaaacaatttctggggaaattgatgtcaatgtaattgctcgcccaagtgcacccaaagaattgaaatttggtgatataaccaaggactcagtacatttgacttgggaaccacctgatgatgatggaggaagtccgttaactggatacgttgttgaaaaacgagaagtcagccggaaaacatggactaaagttatggactttgtgactgatctagaattcacagttcctgatcttgttcaaggaaaagagtacttatttaaagtttgtgctcgtaacaaatgtggccctggagaacctgcatatgttgatgaacctgtaaatatgtcaactcctgcaacggtacctgacccaccagagaatgttaaatggagagatcgaacagccaatagcatcttcttaacatgggatccacctaaaaatgatggtggttcacgcatcaaaggatatatagttgaaagatgtccacgtggttctgataaatgggttgcctgtggagaacctgttgcagaaacaaaaatggaagtgacaggtcttgaggaaggcaaatggtatgcctaccgcgtgaagaccttaaacaggcagggtgctagcaaaccaagcagacccacagaggaaatccaggctgtggacacacaagaggccccagaaatcttcctcgatgtgaagctccttgctggtctcactgtaaaagctgggaccaagattgaacttcctgccaccgtaaccggaaaacctgaacctaaaataacttggacaaaggctgatatgattctgaagcaggacaaaagaattaccattgaaaatgtccctaagaaatccacagtgactattgttgatagtaagagaagtgacactggcacatatatcattgaggctgtgaatgtgtgtggccgggccactgctgtggtggaagtgaacgtcttagataaacccggaccaccagctgcctttgacatcacagatgtaaccaatgagtcatgtcttctaacatggaacccaccacgcgatgatggtggatctaagatcacaaactatgttgtggagagacgagcaactgatagtgaagtgtggcacaagctctcatccaccgtcaaggatacaaacttcaaggccaccaaattaatccccaataaagagtacatcttcagagttgctgcagaaaacatgtatggtgctggtgaaccagttcaggcctctccaataacagccaaatatcagtttgatccacctggtcctccaactcgcctagaaccttctgatatcactaaagacgcagtgactctcacatggtgtgagccagatgatgatggtggcagcccaatcacaggatactgggttgaaagactggatcctgatacagataaatgggttagatgcaataagatgccagtaaaggacacaacatacagagtgaaaggtctcactaataagaaaaaatacagattccgtgtgttggctgaaaatcttgctggacctggaaaaccaagcaaatcaactgaaccaatcttaataaaggatcccatagatcctccatggccccctggaaaaccaactgtaaaagatgtaggcaaaacatcagtaaggttgaattggacaaaaccagaacatgatggaggtgcaaagattgagtcttatgtcattgaaatgctgaagactggaacagatgagtgggtcagagtggcggaaggggttcccaccactcagcacttgctcccagggctcatggaaggacaggaatactcattccgagttagagctgtgaataaggctggggaaagtgaacccagtgaacccagtgaccctgtgctttgccgggagaagctatatcctccatcaccaccacgctggcttgaagttattaatatcacaaaaaatacagcagacctaaaatggacagttcctgagaaagatggagggtcccccatcaccaactacattgtggaaaagagagacgtcaggcgaaaaggctggcaaacagtggataccactgtcaaggacaccaagtgcacagtcaccccactgactgagggctctttatatgtgttccgagttgctgcagaaaatgctataggacaaagcgactacaccgaaattgaggactctgtgctggccaaagacacctttaccactcctggaccaccctacgccctggcagtggttgatgtgacaaaacgacatgttgacctaaagtgggagccacctaaaaatgatggtggaagaccaatacagagatatgtcattgagaagaaagaaaggttaggtacccgttgggtgaaagctggaaagactgcaggacctgactgtaacttcagagtaactgatgtcatcgaaggaacagaggtccagtttcaggttcgggctgaaaatgaagctggagttggccacccaagtgaacccacagaaatcctatccattgaagatccaacaagtcctccctcaccaccccttgacctacatgtgactgatgctgggagaaaacacattgccattgcttggaagcctccagagaaaaatggtggaagtcctatcataggataccatgttgaaatgtgtccagtaggcactgagaaatggatgagagttaattctcgcccaataaaggacttgaaattcaaggttgaagaaggtgttgttcctgacaaagaatatgtcctgagagtgagagcagtcaatgctattggtgtcagcgagccatctgaaatctctgaaaatgtggttgccaaagacccagactgcaagccaacaattgacctggagactcatgacattattgttattgaaggtgaaaagttaagcattcctgttcccttcagagctgtcccagttccaactgttagttggcataaagatggcaaagaagttaaagcaagtgatagattaacaatgaagaatgatcacatctctgcacaccttgaagttcccaagagtgtccgtgcagatgccggaatttataccattacactggagaataagctcggctcagcaacagcctcaatcaatgtcaaagtcataggcctacctggaccatgcaaagatattaaagcaagtgacattaccaagagttcttgtaagttaacttgggaacctccagaatttgatggtggaaccccaattcttcattatgtcctggagcgcagagaagctgggaggagaacatatataccagtcatgtctggtgagaacaaactgtcatggactgtgaaggatctcataccaaatggtgaatacttcttccgtgttaaagcagtcaacaaggttggtggaggagaatatattgaactgaaaaatccagtcattgctcaagatccaaagcaaccccctgatccacctgtagatgtagaggttcataatcctacagcggaggcaatgactattacatggaagccacctttgtatgatggagggagcaagataatgggctacatcatagagaagattgctaagggtgaagaaaggtggaagagatgcaatgaacacctggtaccaatcctgacctatacagcaaaaggacttgaagaggggaaagagtaccaattccgtgtgcgagcagagaacgccgcgggtattagtgaaccttctcgggctactcctccaaccaaagctgtagatcccattgatgcccccaaagtcattctgagaacaagcctagaagtgaaacgaggtgatgaaatagcacttgatgcaagtatttctggatcaccttacccaactattacatggataaaggatgaaaatgttattgtaccagaggaaattaagaagcgtgcagcacccttggttaggagaaggaagggtgaagttcaagaagaagaaccatttgtcctgcctctgacacagcgtttgagtattgacaacagcaaaaagggagaatctcagctacgcgtccgagattctctccgacctgaccatggtctgtatatgatcaaagttgaaaatgaccacggtattgcaaaagctccttgtactgtcagtgtgttagatacaccgggaccaccaatcaactttgtatttgaagatatcagaaagacctcagtcctttgtaaatgggaaccaccccttgatgatggtggcagtgaaatcataaactacactttggaaaagaaagacaagacaaaacccgactcagaatggattgttgtcacttcaacacttagacattgcaaatattcagtaacaaaactgattgaaggaaaagagtacctcttccgtgtaagagctgaaaacagatttgggccaggtccaccatgtgtttcaaagccacttgtggctaaagatccatttggaccacctgatgcaccagataagcccattgtggaagatgttaccagcaacagtatgctagtgaaatggaatgaaccaaaagataatggaagccccattttgggttactggcttgaaaaacgtgaagttaacagtacacattggtctcgtgtcaacaaaagccttctgaatgccttgaaagccaatgtagatggcttattagaaggactcacctatgtcttcagagtatgtgctgaaaatgcagctggacctggaaagttcagtccaccttcagatcccaaaacagcacatgatccaatctctcctcctgggccacctatcccaagagtcactgacacaagctctacaactattgaactagaatgggaacccccagctttcaatggtggtggggaaattgttggctattttgttgataagcagttggttggcacaaataaatggtcacgctgcacagagaagatgatcaaggtccgtcagtacaccgtcaaagaaatccgagagggtgctgattacaaacttcgggtgagtgctgtcaatgccgcaggggaaggaccgcctggagaaacacaacctgttactgtggctgaaccacaagagcctccagctgtggaactggatgtttctgtcaagggtggaatacaaataatggctgggaagactcttagaattccagctgtggtgactggtcgccctgtacctacaaaagtatggaccaaagaagaaggggagctggataaagaccgtgttgtaatagacaacgttggaaccaaatctgaactaattatcaaggatgcactgcgaaaagaccatggcagatatgtgattacagctacaaatagctgtggttccaaatttgcagcagccagggtagaagtttttgatgtccctggtccagttcttgacttaaaacctgttgtaacaaacagaaaaatgtgtctacttaactggtctgatccagaagatgatggaggaagtgaaataacaggctttatcattgaaagaaaagatgccaagatgcatacttggagacaaccaatagagactgagagatctaaatgtgacatcacaggtctgcttgagggacaagaatataagttccgtgttattgccaagaacaagtttggctgtggccctcctgttgaaataggaccaattcttgcagttgatccactaggtcctccaacatctccagagaggctcacatacactgaaagacaaaggtccactatcacacttgactggaaagagccccgcagtaatggtggcagtcccatccaaggatatatcattgaaaaacggcgtcatgacaaacctgactttgaaagagttaacaagcgactctgcccaaccacatcttttctggttgaaaatcttgatgaacaccaaatgtatgagttccgtgtcaaagctgtcaatgaaattggtgaaagtgaaccatccctacctcttaatgtagtcatacaagatgatgaagtgcctccaactattaagttgcgtctgagtgttcgaggagacactatcaaagttaaggcaggagagcctgtccacatccctgcagatgtgacaggccttccaatgcctaagattgaatggtccaaaaatgaaactgtaattgaaaaacccactgatgcacttcagataaccaaggaagaggtatcccgaagtgaggcaaaaactgagcttagcattcccaaagcggtccgggaggacaaaggcacttacacagttactgcttccaatcgccttggctcagtgttccgaaatgttcacgttgaagtatatgaccgcccatccccaccaagaaatcttgctgttactgacattaaagctgaatcttgctacttgacatgggatgcccctcttgataatggtggcagtgaaatcacccattatgttattgacaaacgtgatgcaagtaggaagaaagcagaatgggaggaagtcaccaacactgctgtagagaaaagatatgggatctggaaacttatccccaatggtcagtatgagttccgagtcagggcagtgaataaatatggaatcagtgatgagtgcaaatcagataaagtagtcattcaagatccttatcgccttcctggacctccaggaaaaccaaaagttttggcacgcaccaaaggatcaatgctagtgagctggactcctcctttggacaatggtggctctccaattactggctactggctggagaaaagagaagagggaagtccttattggtcacgtgttagccgagcaccaataaccaaagtgggattgaaaggcgtggaatttaatgttcctcgtttgcttgaaggcgttaaataccagttcagagccatggcaataaatgctgcaggaattggtcctcccagtgaaccatcagatccagaggttgcaggagatcccatatttccaccggggccaccttcttgcccagaagttaaagataaaacgaagtcaagcatctcactaggatggaaacctccagccaaagatggtggcagcccaatcaaaggatacattgtagaaatgcaagaagaaggtactactgactggaaaagagtaaatgaaccagacaaacttataactacctgtgaatgtgtggtgcctaatctgaaagagctcaggaagtacagattcagagtgaaagctgtcaatgaagctggtgaatctgaaccaagtgatacaactggggagatccctgccactgatattcaagaggaaccagaagttttcattgacattggagcacaggactgtctggtttgtaaagctggctcacagattaggattcctgctgtcatcaagggacgcccaacaccaaaatcatcttgggaatttgatggaaaggcaaagaaagcaatgaaggatggagttcatgacatacccgaagatgcacagctggagactgctgaaaactcctcagtaattattattccggagtgtaaacgatctcatacaggcaaatacagcatcacagccaagaataaagcaggacaaaagactgcaaattgcagagttaaagtcatggatgtaccaggcccacccaaagatctgaaagtcagtgatatcacaaggggtagttgcagactttcatggaagatgccagacgacgatggaggagacaggatcaaaggctatgttattgagaagaggactattgatggaaaagcctggaccaaagtcaatccagactgtggaagcaccacatttgtagtgcctgatctcctctctgaacagcaatatttcttccgtgtgcgagcagaaaaccgttttggtattggcccacctgtggaaaccattcagaggaccactgccagagatccgatatatcctcctgatcctcctattaaactcaagattggcctcatcacaaagaacacagtgcatctgtcatggaaacccccgaagaatgatgggggctcccctgttacccactatattgttgagtgccttgcatgggaccctactgggacaaagaaagaagcctggaggcagtgcaataagcgtgatgtggaagaactgcaatttactgttgaagacctagtagaaggtggggaatatgaattccgagtcaaagctgtcaatgctgcaggagtcagcaagccttcagccactgttggcccctgtgactgtcaaagaccagacatgccaccatcaattgatctaaaagaattcatggaggttgaagaaggaaccaatgttaacattgtggccaaaattaaaggtgtgccattcccgacactaacctggtttaaagctcctccaaagaagcctgataacaaagaacctgttctctatgacacccatgtcaacaaactggtggtagatgatacttgcactttagttattccgcagtctcgcaggagtgacactggcttatataccatcacagctgtaaataatctgggaacagcatcaaaggagatgagactgaatgtcctgggtcgtcctggccctccagtgggacccataaaatttgaatctgtttcagcagatcaaatgacactatcttggtttccacctaaagatgatggtgggtctaagattacaaactatgtaattgagaaaagagaagctaacaggaagacatgggtccatgtctccagtgaacctaaggagtgcacgtacacgattcccaaattgctagaaggccatgaatatgtattccgaatcatggcccagaataaatatggcattggagaacctcttgacagtgaacctgaaacagcaagaaacctcttctctgtccctggagcaccagataaaccaacagttagcagcgtgactcgtaactccatgactgtcaactgggaagagccagaatatgatggaggctctcctgtgacagggtactggctggaaatgaaagacaccacttcaaagagatggaagagagttaaccgagatcctatcaaagccatgactttgggtgtttcttataaagtgactggtcttattgaaggttccgactatcaattccgggtatatgcaatcaatgctgctggcgtgggtccagcaagtctgccatcagacccagcgactgctagagatccaattgcccctcctggtcctccatttcccaaagtgacagattggactaaatcatctgcagatctggagtggtctcccccactaaaagatggtggatccaaagtaactggatacatcgttgaatataaagaagaaggaaaagaagaatgggaaaagggtaaagataaagaagtgagaggaacaaagctcgttgtgacaggattaaaggaaggagcattctacaaatttagagttagtgcagtcaacattgctggcattggagaacctggagaggtcacagatgtcattgaaatgaaggacagacttgtttcacctgaccttcagctagatgccagtgtcagagatagaattgttgtccatgctggaggggtgatccgaatcattgcctatgtgtctggaaagcctcctccaaccgtcacctggaacatgaatgaaagaaccttacctcaagaagccaccattgagaccacagccattagctcatccatggtcatcaagaactgccagaggagccatcaaggcgtctattctcttcttgccaaaaatgaagccggagaaagaaagaagacaattattgttgatgtattagatgttccaggtcccgttggaacaccattcctagctcacaacctaaccaatgagtcctgcaaactgacatggttttctccagaagatgatggaggctctccaatcaccaattatgtcattgaaaagcgtgaatctgaccgcagagcatggaccccagtgacatatacagttacccgacaaaatgctactgtccagggtctcattcaaggaaaagcctactttttccgaattgcggctgaaaatagtattggcatgggtccatttgttgagacatcagaggcacttgttatcagagagccaataactgtaccagagcgtcctgaagacctggaagtcaaagaagttactaaaaatactgtaactttgacttggaatcctcctaagtatgatggtgggtcagaaattattaactatgtcctagaaagtcggctcattgggactgagaagttccacaaagttacaaatgacaacttgcttagcagaaaatacactgttaaaggcttaaaagaaggtgatacctatgagtaccgtgtcagtgctgtcaacattgttggacaaggcaaaccatcattttgcaccaaaccaattacttgcaaggatgagctggcacccccaacgcttcacctcgacttcagagataagctcacgattcgagttggtgaagcttttgccctcactggccgttactcaggcaaaccaaagcctaaggtttcctggttcaaagatgaagctgatgtgctggaagatgatcgcactcatataaagactacaccagcaacacttgctttagagaagatcaaggccaaacgttcagattccggcaaatactgtgtggttgtggagaacagtacaggctctaggaaaggtttctgtcaagttaatgttgttgaccatcctggaccaccagtaggaccagttagttttgatgaggtgaccaaagattacatggttatctcttggaagcctcctttagatgatggaggcagtaaaatcaccaattatattattgagaagaaggaagtgggtaaagacgtctggatgccagtgacatctgcaagtgctaaaacaacatgcaaagtttctaaactacttgaaggaaaagattatattttccggatacatgctgaaaatctgtatggaataagtgatcctctggtgtctgattcaatgaaagccaaagatcgtttcagggttcctgatgcacctgatcagccaattgttacagaagttaccaaagactctgcattagtaacctggaataagccacatgatggaggaaaacccatcacaaactacatcctggaaaagagagaaactatgtctaaacgatgggctagagttaccaaagatcctattcatccatacactaaatttagggttcctgatcttctagaaggatgtcagtatgaattccgggtttctgcagaaaatgaaattggtattggagatccaagcccaccatccaaaccagtctttgctaaagatccaattgctaaaccaagtccacctgttaatcctgaagcaatagatacaacatgcaattcagtcgatctaacttggcagccaccacgtcatgatggtgggagcaagattctgggttatattgttgagtaccagaaagttggagatgaagagtggagaagagccaatcacacccctgagtcatgtcctgaaactaaatataaagtcaccggtcttcgggacggtcaaacctataagtttagagtgttagcagtcaatgcagctggtgaatcagatccagctcatgttccggagccagtcctagtaaaagacaggcttgaaccccctgagttgattcttgatgccaacatggcaagagaacaacacattaaagttggtgatactctaagacttagtgccatcatcaaaggagtgccattcccaaaagtaacttggaaaaaagaagacagagatgctccaactaaagcaagaattgatgtgactccagttggtagcaagcttgaaattcgtaatgctgcccatgaagatggtggaatttattctttaacagtggagaatccagctggttcaaaaactgtctcagtaaaagtacttgtattagataaacctgggccacctagagatctggaagtcagtgaaattaggaaagattcatgttaccttacttggaaagaaccactagatgatggtggttctgttattaccaattatgtggttgagaggagagatgttgccagcgcccagtggtcacctctctcagctacatcaaagaaaaagagtcacttcgctaagcatctgaatgaaggcaaccagtacctcttccgagtagctgcggagaaccagtatggacgtggtccttttgttgaaacaccaaaaccaatcaaggctttggatcctctccatcccccagggccacccaaggacctgcaccatgtagatgttgacaagactgaagtctccctagtctggaataagccggatcgtgatggtggttctccaatcactggatatttggtagaatatcaagaagaaggcacccaggactggattaaatttaagactgtgacaaacttagagtgtgtggttactggactacaacaaggaaagacctatagattccgtgtaaaagctgaaaacattgtgggtcttggtctccctgacacaactatcccgatagaatgtcaagaaaaactagtgcctccatccgtggagctagatgtgaaattaattgaaggtcttgtggtaaaggctggaaccacagtcagattccctgctattataagaggtgtgcctgttcctactgcaaagtggacaaccgatgggagtgagattaaaaccgatgagcactacacagttgaaacagacaacttctcatcagtacttaccattaagaactgcttaaggagagacactggggaatatcaaatcacagtttccaatgcagccggtagcaaaacagtagccgtacatcttactgttcttgatgttcctgggccaccaacaggtcctattaatattctggatgttactcctgaacacatgactatctcatggcagccacctaaggatgatggaggaagccctgtgataaattatattgttgagaaacaagatacaaggaaagacacgtggggtgttgtctcttccggaagcagtaagacaaagctgaaaatcccacatctgcagaagggctgtgaatatgttttccgagttagagcagagaataagataggtgttggtcctccccttgactccacacctactgttgctaagcataaatttagtcctccgtctcctcctggtaaaccagtggttactgacattactgaaaatgcagcaacagtgtcttggaccctgccaaaatctgatggtggcagtccaataactggctactatatggaacgtcgagaagtaactggcaaatgggtgagggtcaacaaaacacctatcgctgacctgaagttcagagtgactggactctatgaaggaaatacatatgagtttagagtttttgctgaaaatcttgcaggactaagcaaaccatccccaagttctgatccaataaaagcttgccggcccatcaaaccacctggaccacctattaatcctaaactgaaagacaagagcagagaaacagctgatttggtgtggacaaagcctctcagtgatggtggtagccccattctaggatatgtagtggaatgtcagaaacctggcacggcacaatggaacaggattaataaagatgaactcattaggcaatgtgcctttagggtacctggactaattgaaggaaatgagtacagattccgtataaaggcagctaatattgtaggagagggtgagccaagagaactagcagaatctgtgattgcaaaagatatccttcatcctccagaagtagaacttgatgttacttgtcgtgatgttattaccgtgagagtaggccaaactatccgcattctagctcgagtcaaaggcagacctgaaccagacataacttggactaaggaaggcaaagtattggtccgagaaaagagggtggaccttattcaggatctacctcgtgttgagttacaaattaaagaagctgttagagctgatcatggcaagtatatcatctcagctaagaacagcagtggacatgcccaaggttcagccatcgttaacgtccttgacagacctgggccttgccagaatttgaaggttaccaatgtaaccaaagagaactgtacaatttcttgggaaaacccactagataatggtggctcagaaataacaaacttcatagtagaatatcgcaaaccaaaccagaaaggctggtcaattgttgcatcagatgtcactaaacgattaatcaaggccaaccttttagccaacaatgaatactatttccgagtttgtgcagagaataaagtaggtgttgggccaaccatcgaaacaaaaactcccattctggctattaaccctattgacagaccaggtgagcctgaaaaccttcacattgcagataaaggaaagacatttgtctacctaaagtggcggaggcctgactatgatggtggcagtccaaatctgtcatatcatgttgagagaaggcttaagggctccgatgactgggaaagagtgcataaaggaagcattaaagaaactcactacatggttgacagatgtgttgaaaaccagatttatgagttcagagtgcaaacaaagaatgaaggtggggaaagtgactgggtgaagacagaggaagttgttgtgaaagaagacttacaaaaaccagtacttgatctgaaattaagtggggtcctaactgtcaaagcaggggacaccattaggcttgaggcaggggttagaggcaaaccattcccagaagttgcatggaccaaggacaaagacgctacagacttaacaagatcaccaagggtcaagattgatacccgtgctgattcatctaaattttctcttactaaagcaaagcgaagtgatgggggtaaatatgtagttacggcaactaacacggctggcagttttgtggcctatgccactgtcaatgttttagataagcctggtcctgtgagaaatctgaaaattgttgatgtgtccagtgataggtgtactgtttgctgggatccaccagaagatgatggtggctgtgaaatccaaaattatattctagaaaaatgtgagacaaagcgaatggtttggtctacctattctgctactgtcttgacacctggtactacagtaacacgtctcatagaaggaaatgaatatattttcagagtccgtgcagaaaataaaataggcacagggcctccaacagaaagtaaaccagtcatagccaaaaccaagtatgataaacctggtcgccctgatcccccagaagtcactaaagtaagcaaagaagagatgactgtggtttggaatccacctgaatatgatggtggaaagtctataactggatactttttggagaaaaaggaaaagcattcaacacgatgggtccctgtcaacaagagtgcaatccctgagagacgtatgaaagtacagaatctcctcccagaccatgaatatcagttccgtgtcaaggcagaaaatgaaattggaattggagaaccaagcttgccttcaagaccggtggtggcaaaagaccccatagagccacctggtccaccaaccaatttcagagtggttgatacaaccaaacattccataactcttgggtggggaaaaccagtctatgatggtggtgcaccgatcattggatatgttgtggaaatgagaccaaaaatagcagatgcgtctcctgatgaaggctggaaacggtgtaatgctgcagcacagcttgtacgcaaggaattcactgttaccagcttggatgaaaaccaggaatatgagttcagggtgtgtgcccaaaaccaagttggtattgggcgccctgcagagctaaaggaagctatcaaacctaaagaaatactagaacctccggagattgatttggatgccagcatgaggaaactggtcatagtgagagcaggatgccctattcgtctctttgctatagtgagaggacgaccagcccctaaagtcacttggcgaaaagttggcattgataatgtggtcagaaaaggacaagttgatctggttgacactatggccttccttgtcatccccaattctacccgtgatgactcaggaaaatattccttaacacttgtgaacccagcaggagaaaaggctgtattcgtaaatgtcagagtattagacactcctgggcctgtgtctgatttaaaagtttcagatgtcactaaaacatcatgccatgtgtcctgggcccctcctgaaaacgacggtgggagccaagtgacacattatatcgtggagaaacgtgaggcagacagaaagacatggtcgaccgttaccccagaagttaagaaaacaagcttccatgtaaccaatcttgtccctgggaatgagtattacttcagagtaactgctgtcaacgaatatggccctggcgtcccaacagatgtcccaaaaccagtgcttgcatcagatcctctaagtgagccggatcccccaaggaaattagaagcgactgaaatgaccaagaacagtgccaccttagcctggttacctcccctacgtgatggaggtgctaaaatcgatggctacatcattagttacagagaagaagagcagcctgcagatcgctggacagagtactcagtggtaaaagatctgagccttgttgtcactggcctaaaggaaggaaagaaatacaaatttagagtagcggccagaaatgctgttggagtcagtttgccaagagaagctgaaggagtgtatgaagccaaagagcaactgttgccaccaaagatccttatgccagagcaaataactatcaaagctgggaaaaaactccgaattgaagcccatgtgtatggaaagcctcatcccacctgtaaatggaaaaaaggagaagatgaagttgtcacatccagccacctggcagtgcataaagcagacagctcttcaattctgatcataaaagatgtgactaggaaagacagtggttactacagcctcacagcagagaacagttctgggacagacactcagaaaatcaaagttgtagtcatggatgcccccggcccccctcagcctccatttgacatttctgatatagacgctgatgcttgctccctgtcatggcacatccctctggaggacggaggcagtaacatcaccaattatatagtggagaagtgtgatgtaagccgaggtgactgggtcacggctctagcttcagtcacaaaaacttcctgcagggttggaaagctgatcccaggccaagagtacatcttccgggtccgtgctgaaaaccgatttggcatttcagagcctctcacatctccaaagatggttgcgcagttcccatttggtgttcctagtgaaccaaagaatgcacgagtcaccaaagtcaacaaggactgtatttttgttgcttgggacagaccagatagtgatggagggagccccattattggttatctgattgaacgcaaggaaagaaacagtttgctgtgggtgaaagccaatgatactcttgtccggtcaactgaatatccttgtgctggccttgtagaaggtcttgagtattcattcagaatctatgccctaaacaaagctggatccagcccacccagcaaacccacagaatatgtaactgcaagaatgccagttgatcctcctgggaaacctgaggttattgatgtcaccaagagtactgtatctctgatctgggctcgtccaaagcatgatggaggcagtaaaattattggctatttcgtagaagcttgcaaacttcctggtgataaatgggtacggtgcaatactgcacctcaccagattccccaggaagagtacacagctactggcctagaagagaaagctcagtatcaatttagagctattgccaggaccgcggtaaacattagcccaccttctgaaccttctgatccagtgactatcctcgcagaaaatgtccctcccaggatagacctgagtgtggctatgaaatctttgcttactgtgaaagctggaactaatgtctgcttggatgctactgtttttggtaaaccgatgccaacagtttcttggaaaaaagatggcacactgctaaaaccagcagaaggcataaagatggccatgcagcggaatctgtgcaccttggagctattcagcgtgaaccggaaggactcaggagactataccattactgctgaaaattcaagtggttctaaatcagccaccattaagcttaaagtgttagataaaccgggtcctccagcatctgttaaaatcaacaaaatgtattcagatcgtgctatgctttcttgggaaccgcctcttgaagatggaggctcagaaatcaccaactatattgttgacaaacgtgaaacaagcaggcccaactgggctcaagtctctgcaactgtgcctatcaccagctgcagcgtggagaaacttatagagggccatgagtatcagttccgtatttgtgctgaaaataaatatggagtaggcgatccagtcttcactgaaccagcaattgccaaaaacccatatgacccaccaggacgctgtgatcctcctgttattagcaacataaccaaagatcacatgacagtcagctggaagccaccagcagatgatgggggctcacccatcactggctatttgcttgaaaagcgggaaacccaggctgttaactggactaaggtcaacagaaaacctattatagaaagaacattaaaagcaacaggtcttcaagaaggtaccgaatatgagttccgtgttacagctataaataaagctggaccaggcaaacccagtgacgcatccaaggccgcttatgctcgggaccctcagtatcctcctgcgccaccggctttccctaaagtatatgatacaactcgcagctctgtgagtctatcttggggcaagccagcctatgacggcggcagccctatcattggttatctcgttgaagtaaaacgggctgactccgataactgggtgaggtgcaacttaccacagaatctacagaaaacccgctttgaggttactggcctgatggaagacacacaatatcaattccgtgtgtatgccgttaataagattggatacagtgaccccagtgatgtgccagataaacactatcccaaggacatcttaattccacctgagggagaacatgatgcggacttaaggaagacactcatattacgtgctggagttactatgagactatatgtaccagtaaaaggacgcccacctccaaagattacttggtctaaaccaaatgtcaatctaagagacaggattggactggacataaagtcaactgactttgacactttcttgcgctgtgaaaatgtgaacaaatatgatgcaggaaaatatatcttaaccctggagaacagctgtggtaaaaaggaatataccattgttgtgaaagtgcttgatactcctgggccacctatcaatgtgactgttaaggaaatatccaaagactctgcttatgttacctgggagcctcccattattgatggcggaagccccatcataaactatgtggtacaaaaacgtgatgcagagaggaaatcctggtctacagtgacaactgagtgctccaaaacaagcttcagagtacctaatttggaggagggaaaatcctacttcttccgagtgtttgctgaaaatgagtatggcattggtgatcccggtgaaactcgtgatgctgtcaaagcttcccaaactcctggaccagttgtggacctgaaagtgaggtctgtatctaagtcatcctgtagcattggctggaaaaagcctcacagtgatggtggaagtcggattattggatatgtagttgatttcctgactgaagaaaataagtggcaacgagttatgaaatccttaagcctacagtactctgcaaaagatttgactgaagggaaggaatataccttcagagtgagtgctgagaatgaaaatggagaaggaaccccaagcgaaatcactgttgtggcaagggatgatgttgtggctcctgatcttgacttaaagggtctacctgatttgtgctacttggctaaagaaaacagcaacttccggcttaagatccccataaaaggcaagccagctccatcagtctcctggaagaaaggggaagatcctctagcaactgacactagagtcagtgttgagtcatctgcggttaacacaactcttatagtgtacgattgccaaaaatctgatgctggaaaatacacaatcacacttaagaatgttgctggcaccaaggaaggaactatctccataaaggttgttggcaagcctggcatccccactggaccaatcaaatttgatgaagtcacagcagaagccatgaccttaaagtgggctcctccaaaggatgatggaggttctgaaatcaccaactatatcctagagaagagggattctgtgaacaacaagtgggtgacgtgcgcctcagctgtccagaaaaccacctttagagtaaccagacttcatgagggcatggaatataccttcagggtcagtgccgaaaataaatatggtgtaggggaaggcctgaaatcggagccaattgttgcgagacatccatttgatgtgcctgatgctcccccacctcccaatattgtggatgtcagacacgattcagtatctctaacttggactgaccccaagaaaactggtggttctccaattacagggtatcatctcgagttcaaggaaagaaacagccttttgtggaagagagctaacaagactccgataaggatgagagactttaaagtgacaggattaactgaaggtcttgaatatgaattccgagttatggcaatcaatttagcaggtgtgggcaagccaagcctaccatcagagcctgttgtggcactggacccaattgatcctcctggaaaacctgaggttattaacataacaaggaattcagtgactctcatttggactgaacctaaatatgacggtggtcataagttaactggatatatagtggagaagcgagatctaccttcgaagtcttggatgaaagccaaccatgttaatgtcccagaatgtgcctttactgtaactgaccttgttgagggtggaaaatatgaattcagaattagagcaaagaatacagcaggtgctatcagtgctccatcagaaagtacagaaaccattatttgcaaggatgaatacgaggcaccaacaattgtccttgatcccacaataaaagatgggctaacaattaaagcaggggataccattgttttgaatgccattagcattcttggcaaaccccttccaaaatcaagttggtccaaggcaggaaaagacattagaccatcagatatcactcagataacttcaaccccaacatcttccatgcttactatcaagtatgccactagaaaagatgcgggtgaatataccatcactgctaccaatccttttggcacgaaggtggaacatgtgaaggtaacagtccttgatgtacctggtcccccaggtcctgttgaaatcagtaatgtttctgctgaaaaagcaacacttacatggacacctcccttggaagatggcggctcaccaattaagtcctatatacttgaaaagagagaaaccagccgacttttgtggacagtggtttctgaagatattcagtcttgcaggcatgtggcaaccaaacttatccaaggaaatgagtacatcttccgggtctcagctgtaaaccactatggcaaaggagaacctgtacagtctgaacctgtcaaaatggtagacagatttggtccccctggccctcctgaaaaaccagaggtatcaaatgtcactaagaacactgccactgtcagctggaaaaggccagtggatgatggtggcagcgaaattacaggatatcatgtagaaaggagagaaaagaaaagcctgcgatgggtgagagcaataaaaacaccagtttccgatctcaggtgcaaagtaacaggactgcaagaaggaagcacctacgaattccgtgtcagtgcagaaaacagagcaggaattggtccacccagtgaggcttcagattctgttctgatgaaagatgcagcatatcctccaggaccaccttcaaatccgcatgtcactgatactaccaagaaatctgcttctttggcatggggcaagcctcattatgatggtggacttgaaatcactggctatgtcgtggagcatcaaaaagtaggagacgaggcctggataaaagataccacaggaaccgccctcagaatcactcagttcgttgttcctgatcttcagactaaagaaaaatacaacttcagaatcagtgccatcaacgatgcaggtgttggggagccagcggtgattccagatgttgaaatcgtagaacgggagatggctcctgattttgaactagatgccgagcttcgaagaacacttgttgttagagcaggactcagtattaggatatttgtgccaattaaaggtcgtcctgctcctgaagtgacatggaccaaagataacatcaacctgaaaaaccgagccaacattgaaaatacggaatcatttactcttctgattatcccagaatgtaacagatatgataccggtaaatttgtcatgaccattgaaaacccggctgggaagaaaagtggctttgtgaacgtcagagtcttggacacgccaggcccagtcctcaacctgcggcctacagacatcacaaaggacagtgtcaccctgcactgggacctccctctgatagatggaggctcacgtataacaaactacattgtagagaaacgtgaagcaacacggaaatcttattccacagccaccactaagtgccataaatgcacatataaagttaccggcttgtctgaagggtgtgaatatttcttcagagtgatggcagagaatgaatatggaattggtgagccaacagaaactacagagcccgtaaaagcctctgaagcaccatctccaccagacagccttaacatcatggacataactaagagcaccgtcagcctggcatggcctaagcccaaacacgatggtggcagcaagatcactggctatgtgattgaagcccaaagaaaaggctctgaccagtggacccacatcacaaccgtgaaagggttagaatgtgttgtgaggaatctaactgaaggagaggaatataccttccaagtgatggcagtgaacagcgcggggagaagtgcccctagagaaagcagacccgtcattgtcaaggagcagacaatgcttccagagctggatctccgtggcatctatcagaaactggtcattgccaaagctggtgacaacatcaaagttgaaattccagtgctcggtcgaccgaagcccacagtgacatggaaaaaaggagaccaaattcttaaacagacacagagagttaattttgaaaccacagcgacttcaaccattttaaatatcaatgagtgtgtcagaagtgatagtgggccctatccattaacagcaaggaacattgtaggagaggttggtgatgtcatcaccattcaagtccatgatatcccagggccacctactggaccaatcaaatttgatgaagtttcatctgattttgtaaccttctcttgggacccacctgagaacgatggtggtgtaccaataagcaactatgtagtggaaatgcggcagactgacagtactacctgggttgagttagcaaccaccgttatacgtactacctataaagccacccgccttactactggattagagtatcagttccgtgtaaaagctcagaatagatatggagttggaccaggcatcacatcagcatggatagttgccaactatccatttaaggttcctggacctcctggtacccctcaggtaactgcagttaccaaggattcaatgacaattagctggcatgagccactttctgatggtggaagccccattttaggatatcatgttgaaagaaaagaacgaaatggtattctctggcagactgtgagcaaagctttagtaccaggcaacattttcaaatcaagtggacttacagatggtattgcttatgagttccgggtgattgcagaaaacatggcaggcaaaagtaagccaagcaagccatcagaacctatgttggctctggatcccattgacccacctggaaaaccagtacctctaaatattacaagacacacagtaacacttaaatgggctaagcctgaatatactgggggctttaaaattaccagttatatcgttgaaaagagagaccttcctaatggacggtggctgaaggccaacttcagcaacattttggagaatgaatttacagtcagtggcctaacagaagatgctgcatatgaattccgtgtgatcgccaaaaatgctgcaggtgccatcagtccaccatctgagccatctgatgctatcacttgcagggatgatgttgaggcaccaaagataaaggtggatgttaaatttaaggacacggttatattaaaagcaggtgaagcattcagactggaagctgatgtttcaggccgcccacctccaacaatggaatggagcaaagatggaaaagagctggaaggcacagcaaagttagaaataaaaattgcagatttctctactaatctggtaaacaaagattcaacaagaagggatagtggtgcctatacccttacagcgactaatcctggtggctttgctaaacacattttcaatgtcaaagttcttgacagaccaggcccacctgaaggacctttggctgtaactgaagtgacatcagaaaagtgtgtactatcatggttccctccactggatgatggaggtgccaaaattgatcattacatagtacagaaacgtgaaaccagcagattggcatggacaaatgtagcctcagaagtccaagtaacaaagctaaaggtcactaaactcttgaaaggcaatgaatacatattccgtgtcatggctgtaaataaatatggagtgggagagccactggaatcagagcctgtgcttgcagtgaatccttatggaccccctgatccgcccaaaaaccctgaagtgacaactattactaaagattcgatggttgtctgctggggacatcctgattctgatggtggaagtgaaatcatcaattatattgtggaacggcgtgataaagctggccaacgctggattaaatgcaacaaaaaaactcttactgatttaagatataaagtgtctggactgacagaaggacatgaatatgagttcaggattatggctgaaaatgctgctggaattagtgcaccaagtcctaccagtccattttacaaggcttgtgacactgtgtttaaacctggaccaccaggtaacccacgtgttctggatacaagcagatcatccatttcaatcgcttggaataaacctatctatgatggtggttcagaaatcactgggtatatggttgagattgccctgccagaggaagatgaatggcagattgtcactccaccagcaggactcaaggcaacttcgtatactatcactggcctcacagagaatcaggaatataagatccgcatctatgccatgaattccgaaggacttggggaacctgcccttgttcctggaactccaaaggctgaagacagaatgctgcctccagaaattgaactggatgctgacctgcgcaaagttgttactataagggcctgctgcaccctgagactttttgttcccatcaaaggaaggcctgaccctgaggtgaagtgggcccgggaccatggagaatctttagataaagctagcatcgaatccgcaagctcttacaccctgcttattgttggaaatgtaaacagatttgacagtggcaaatatatactaactgtagaaaatagttcaggcagcaagtctgcatttgtcaatgttagagttctcgatacaccaggccccccacaggatctgaaggtaaaagaggtcactaagacatctgtcacactcacatgggacccacctctccttgatggaggttcaaaaatcaagaactatattgttgaaaagcgggaatcaacaagaaaagcatattcaactgttgcaacaaactgccacaagacttcctggaaggtagaccagcttcaagaaggctgtagctactatttcagggttctcgcagaaaatgaatatggcattgggctgcctgctgaaaccgcagaatctgtgaaagcatcagaacgacctcttcctccaggaaaaataactttgatggatgtcacaagaaatagtgtgtcactctcttgggagaaaccagagcatgatggaggcagccgaattctaggctacattgtggagatgcagaccaaaggcagtgacaaatgggccacgtgtgccacagtcaaggtcactgaagccactatcactggattaattcagggtgaagaatactctttccgtgtttcagctcagaatgaaaagggcatcagtgatcctagacaactgagtgtgccagtgatcgccaaagatcttgtcattccaccagccttcaaactcctgttcaatactttcactgtactggcaggtgaagacctaaaagttgatgttccattcattggccgccctaccccagctgtaacctggcataaagataatgtaccactgaagcagacaactagagtaaatgcagagagcacagaaaataattcactactgacaataaaggacgcctgccgagaagatgttggccattatgtggttaaactgactaactcagctggtgaagctattgaaacccttaatgttatcgttcttgacaaaccagggcctccaactggaccagttaaaatggatgaagtgacagctgatagtattactctttcctggggcccacccaagtatgatggcggaagttctatcaataattacattgttgagaaacgggacacttccacaaccacctggcaaattgtatcagctacagttgcaaggacaacaataaaggcttgcagactgaagactggatgtgaatatcagtttagaattgcagctgaaaacagatatgggaagagtacctacctcaattcagagcctactgtagcccaatatccattcaaagttcctggtcctcctggcactccagttgtcacactgtcctccagggacagcatggaagtacaatggaatgagccaatcagtgatggaggaagtagagtcattggctatcatctagaacgcaaggaaagaaatagcatcctctgggttaagttgaataaaacacctattcctcaaaccaagtttaagacaactggccttgaagaaggtgttgaatatgaatttagagtctctgcagagaacatcgtgggcattggcaagccgagtaaagtatcagaatgttatgtggctcgtgacccatgtgatccaccaggacggccagaggcaatcattgtcacaaggaattctgtgactcttcagtggaagaaacccacctatgacggtggaagcaagatcactggttatattgttgagaagaaagaattacctgagggccgttggatgaaagccagttttacaaatattattgacactcattttgaagtaactggcctagttgaagatcacagatatgagttccgggttatagcccgaaatgccgcaggagtgtttagtgagccttcagaaagcacaggagcaataacagctagagatgaggtagatccaccacgaataagtatggatccaaaatacaaagacacaatcgtggttcatgctggtgaatcattcaaggttgatgcagatatttatggcaaaccaataccaaccattcagtggataaaaggtgatcaggagctttcaaacacagctcgattagaaataaagagcaccgactttgccaccagtctcagtgtaaaagatgcagtacgtgtcgacagtggaaattacatactgaaggccaaaaatgttgcaggagaaagatcagttactgtgaatgtcaaggttcttgacagaccagggccacctgaaggacctgttgttatctcaggagttacagcagaaaaatgcacactagcttggaaacccccacttcaggatggtgggagtgacatcataaattatattgtggaaaggagagaaaccagccgcttagtttggactgtggttgatgccaatgtgcagactctcagctgcaaggttactaagcttcttgaaggcaatgaatatactttccgtataatggcagtaaacaaatatggtgttggtgaacctcttgaatctgagccagtagttgccaagaatccatttgtagtaccagatgcaccaaaagctccagaagtcacaacagtgaccaaggactcaatgattgttgtatgggaaagaccagcatctgatggtggtagtgaaattcttggatatgttcttgagaaacgggataaagaaggcattagatggacaagatgccataagcgtctgattggagagttgcgcctgagagtaactggactcatagaaaatcacgattatgagttcagagtttctgctgagaatgctgctggacttagtgaaccaagccctccttctgcttaccaaaaggcttgtgatcctatttataaaccaggacccccaaacaaccccaaagtcatagacataaccagatcttcagtattcctttcttggagcaaaccaatatatgatggtggctgtgaaattcaaggatacattgttgaaaaatgtgatgtgaatgttggtgaatggacaatgtgcactccaccaacaggaattaataaaacaaacatagaagtagagaagctgttggaaaagcatgaatacaacttccgtatctgtgctattaataaagctggagttggagaacatgctgacgtccctggacctattatagttgaagaaaaattagaagcaccagacattgatcttgacctagaactaaggaaaatcataaatataagggcaggtggctccttaaggttatttgttcctataaaaggtcgtcctacaccagaagttaaatggggaaaggtggatggtgaaatccgagatgcagctataattgatgtcactagcagtttcacctctcttgttcttgacaatgtcaaccgatatgatagtggaaaatatacgcttacattagaaaacagcagtggaacaaagtctgcctttgttactgtgagagttctggacacgccaagtccacctgttaacctgaaagtcacagaaatcaccaaagactcagtatcaattacatgggaacctcctttgttggatgggggatccaaaataaaaaattacattgttgagaaacgtgaagccacaagaaaatcatatgctgctgttgtaactaactgccataagaattcttggaaaatcgatcagctccaagaaggttgcagttattactttagagtcacagctgagaatgagtatggtattggccttcctgcccagactgctgatccaattaaggttgcagaagtgccacaacctcctggaaaaataactgtggatgatgtcaccagaaacagtgtctctctgagttggacaaaacctgaacatgatggtggcagtaaaatcattcagtatattgtggaaatgcaagctaaacacagtgagaaatggtcagagtgtgctcgagtaaagtctcttcaggcagtaattaccaacctaactcaaggggaagaatatctttttagagttgttgctgtaaatgaaaaggggagaagtgatcctcggtcccttgcagttccaatagttgccaaagatctggtaattgagccagatgtaaaacctgcattcagtagttacagtgtacaggttggccaagatttgaaaatagaagtgccaatttctggacgtcctaagccaaccattacctggactaaagatggtctcccactgaagcagaccacaagaatcaatgttaccgattcactggatctcaccacactcagtattaaagaaactcataaggatgatggtggacaatatggaatcacagttgccaatgttgttggtcagaagacagcatccatcgaaattgtaactctagataaacctgatcctccaaaaggacctgttaaatttgatgacgtcagtgctgaaagtattacattatcttggaaccctccattatatacagggggctgccaaatcaccaactacattgttcagaaaagagatacaaccaccacagtatgggatgttgtttctgctactgttgctagaactacactcaaagtgaccaaactgaaaactggtacagaataccaatttagaatatttgccgaaaacagatatggacaaagctttgccttagagtctgatccaattgtagctcaatatccctacaaagaaccaggccctccaggtacaccatttgccacagccatttccaaagactccatggtcatacagtggcatgaaccagtcaacaatggtggaagccccgtcataggttaccacctggagagaaaagaaagaaacagtattttgtggacaaaggtcaacaaaactattattcatgacacccaattcaaagcacagaatcttgaagaaggcattgaatatgaattcagagtgtatgctgaaaatattgttggtgtaggcaaagcaagcaagaattctgaatgctatgtagccagagatccctgtgacccaccaggaaccccagaaccaataatggttaaaagaaatgaaatcactttacagtggaccaaacctgtgtatgatggtggaagtatgattacaggctacattgtagagaaacgtgatttgcctgatggtcgttggatgaaagctagctttacaaatgtcattgaaactcaatttactgtgtcaggtcttactgaagatcaaagatatgaattcagagtcattgcaaagaatgcagctggtgcaataagtaaaccctctgacagtactggaccaataactgccaaggatgaggttgaactcccaagaatttcaatggatccaaaattcagagacacaattgtggtaaatgctggagaaacattcagacttgaggctgatgtccatggaaagcccctacctaccattgagtggttaagaggagataaggaaattgaagaatctgctagatgtgaaataaagaacacagatttcaaggctttacttattgtaaaagatgcaattagaattgatggtgggcagtatattttaagagcttccaatgttgcaggttctaagtcattcccagtaaatgtaaaagtattagatagaccaggacctccagaagggccagtccaggttactggagtcacttctgaaaaatgctctttaacatggtctccaccacttcaagatggtggcagtgacatttctcactatgttgttgaaaagcgagaaaccagtcgacttgcctggactgttgttgcttcagaagttgtgaccaattctctgaaagttaccaaactcttagaaggtaatgaatatgttttccgtataatggctgtcaacaaatatggtgttggagagcctttggaatctgcaccagtactaatgaaaaatccatttgtgcttcctggaccaccaaaaagcttggaagtcacaaatattgccaaagactccatgaccgtctgttggaaccgtccagatagtgatggtggaagtgagattattggttacattgtagagaaaagagacagaagtggcattcgatggataaaatgtaataaacgccgcattacagatttgcgtctaagagtgacaggattaacagaagatcatgagtatgaattcagggtctctgcagaaaatgctgctggagttggggaaccaagtccagctacagtttattataaagcctgtgatcctgtgttcaaacctggcccacctaccaatgcacacattgtagacaccactaaaaattcaatcacacttgcctggggtaaacccatctatgatggcggcagtgagatcttgggatatgtagtagaaatctgtaaagcagatgaagaagaatggcaaatagttactccacagactggcctgagagtcactcgatttgaaatttcaaaactcactgaacaccaagagtataaaatacgagtctgtgccctcaacaaagttggtttaggtgaggctacatcagttcctggtactgtgaaaccagaagataaacttgaagcacctgaacttgaccttgactccgaattaagaaaaggaattgttgtaagagctggtggatctgccagaattcacattccattcaaaggtcgtccaatgcctgagatcacttggtctcgagaggaaggtgaattcacagataaggtccaaattgaaaagggagtaaactatacccaactatcaatagataactgtgatagaaatgatgctggaaaatacattcttaagttggaaaacagcagtggatcaaagtctgcttttgtaactgtgaaagttcttgacactccaggaccaccacagaatttggcagtcaaagaagtgagaaaagattctgccttcctggtatgggagccacccatcattgatggaggggcaaaggtcaagaactatgtgattgacaaacgtgagtcaaccagaaaagcgtatgctaatgtgagtagtaaatgcagcaaaacaagttttaaagtggaaaaccttacagaaggagccatttattacttcagagtcatggctgaaaatgaatttggagttggtgttccagtggaaactgttgatgccgtgaaagctgctgaacctccttccccaccaggaaaggttacactcactgatgtgtcccagaccagtgcatcacttatgtgggagaaacctgaacatgatggcggtagcagagtcctggggtacgttgttgaaatgcagcccaaaggaactgaaaaatggagcattgtggctgaatccaaagtctgtaatgcagttgttactggtttgagttctggacaagaatatcagttccgtgtcaaggcttataatgagaaaggaaaaagcgatccaagagtgttgggtgttcctgtcatagccaaggacttgactatacagcctagtttaaagttaccatttaacacatatagtatccaagctggagaagatcttaaaatagaaattccagttataggccgaccaagacctaacatttcttgggtcaaagatggtgagcctcttaaacagacaacaagagtaaacgttgaagaaacagctacctcaactgttttgcacattaaagaaggtaacaaagatgactttggaaaatacaccgtaacggcaacaaatagtgcaggcacagcaacagaaaatctcagtgttatcgttttagaaaagcctggacctccagttggcccagttcggtttgatgaagttagtgcagactttgtagtcatatcttgggaacctccagcctatactggtggctgccaaataagcaactacattgtagagaagcgagatacaaccaccaccacttggcacatggtatcagcaacagttgcaagaacaacaattaaaataaccaaactgaaaacaggcacggagtaccagtttagaatttttgctgaaaacaggtatggaaaaagtgccccactggattctaaggcagttattgtacaatatccatttaaagaacctggaccacctggaactccttttgtgacatcaatctcaaaagatcagatgcttgtgcaatggcatgagccagtgaatgatggaggcaccaaaattattggctaccatcttgaacagaaagaaaagaacagtattttatgggtcaagttaaataagacccccattcaggacaccaaattcaaaacaactgggcttgatgagggccttgagtatgagttcaaagtttctgctgaaaatattgttggcattggcaagcctagcaaagtgtcagaatgctttgttgctcgtgatccatgtgacccacctggtcgccctgaagccattgttattacaagaaacaatgtcacactgaaatggaagaaacctgcctatgatggtggtagcaaaataacaggttatattgtagaaaagaaagatctacctgatggccgctggatgaaagccagctttaccaacgtattagaaactgaatttacagtgagtggacttgtagaagaccaaagatatgaatttagagtaattgcaagaaatgcagctggaaactttagtgaaccatctgatagtagtggtgccattactgcaagagatgaaattgatgcaccaaatgcctctctggatccaaaatataaagatgtcatcgttgttcatgcaggagagacttttgttcttgaagccgacatccgtggcaaacctatacctgatgttgtttggtcaaaagatggaaaagaacttgaagaaacagctgctagaatggaaattaaatctactattcagaaaacaactcttgttgtcaaagactgtatacggactgatggaggacaatatattctgaaactcagcaatgttggtggtacaaagtctatacccatcactgtaaaggtacttgacaggccagggtctcctgaagggcctctgaaagttactggagttactgcggaaaaatgttacctggcatggaacccacctttgcaagatggtggtgctaatatttcacattacatcattgaaaagagggagacaagccgactctcttggacccaggtttcaactgaggtacaggcccttaactacaaagttactaaacttcttcctggtaatgagtacattttccgtgtcatggctgtgaataaatatggaattggagagcccttggaatctgggcctgttacggcctgtaatccttataagccaccaggtcctccctcaacacctgaagtctcagcaatcaccaaagattctatggtagtaacatgggcacgcccagtagacgacggaggtaccgaaattgagggctacattcttgaaaaacgagataaggaaggcgttagatggaccaagtgcaacaagaaaacattaacggatctgcggctcagggtaactggtcttaccgaaggccattcctatgaattcagagttgctgctgaaaatgcagctggtgtgggagaacctagtgagccatctgttttctaccgtgcgtgtgatgccttgtatccaccaggtcccccaagcaatccaaaagtgacggacacttccagatcttctgtctccctggcatggagtaagccaatttatgatggtggcgcacctgttaaaggctatgttgtagaggtcaaagaagctgctgcggatgaatggacaacctgcactccaccaacaggattacaaggaaagcagttcacagtgaccaagcttaaagaaaacactgaatataacttccgtatttgtgccatcaattctgaaggtgtaggtgaacctgcaactctacctggctcagtggttgctcaggagaggatagagccaccagaaatagaactcgatgctgatctcagaaaggtggtcgttctgcgtgcaagtgctactttacgcttatttgtcactatcaaaggtcgaccagaacccgaagttaaatgggaaaaggcagaaggcattctcactgacagggctcagatagaggtgaccagctcatttacaatgttggtgattgataatgttaccagatttgacagtggtcggtataatctgacattagaaaataatagtggctccaaaacagcttttgttaacgtcagagttcttgactcaccaagtgcccctgtgaatttgaccataagagaagtgaagaaagactcagtgacgttgtcctgggaaccaccacttattgatggtggagctaagattacaaactacattgtcgaaaaacgagaaactacaagaaaagcctatgctaccattacaaataattgcactaaaactactttcagaattgaaaatctacaagaaggatgttcttactacttccgagtcttggcttccaatgaatatgggattggtttgccagctgaaacaacagaacccgttaaagtgtctgaaccacccctcccacctggaagagtaactcttgttgatgtgacccgtaatacagctacaattaagtgggagaaaccagaaagtgatggtggcagcaaaattactggttatgtggttgaaatgcagactaaagggagtgaaaagtggagcacctgcacacaagttaagactctagaagcaactatatctggcttaactgcaggagaagagtatgtcttcagggtagctgcagttaacgaaaagggaagaagtgatccaagacaacttggagtgccagtaattgcaagggatattgaaataaagccttcagttgagcttcctttccatactttcaatgtaaaggctagagaacaacttaagattgatgtgccattcaaaggaagacctcaagctactgtgaactggagaaaagatggtcagactcttaaagagacaactagagtcaatgtttcttcttcaaagactgtaacatcactatctattaaggaagcttcaaaggaagatgttggaacttatgaattatgtgtttcaaacagtgctggatccataacagttcctattactataattgtccttgacagaccaggacctccaggtcctatacgtattgatgaggttagttgtgacagcataaccatttcttggaatcctccagaatatgatggtggctgccaaattagcaattacattgttgaaaagaaagaaaccacctctacaacatggcacatagtttcacaagcagttgcaagaacatccattaaaatagttcgcctgacaacaggaagtgagtatcagttccgtgtttgtgcagaaaaccgctatggaaagagctcctacagtgaatcttcagctgttgttgcagagtatccattcagtcccccaggtcctcctggtactcctaaagttgtgcatgccacaaaatctaccatgcttgtaacctggcaagtgccagttaatgatggaggaagtcgagtaattggctatcatcttgagtataaagaaagaagcagcattctttggtcaaaagcaaataaaatcctcattgctgatactcaagtgaaagtctccggccttgatgaaggactgatgtatgagtatcgtgtatatgctgaaaatattgctggaattggtaaatgcagtaaatcttgtgaaccagtccctgcaagagatccttgtgaccctcctggacaacctgaagtcacaaatatcacaagaaaatcagtgtcacttaaatggtctaaaccacattatgatggtggagctaagatcacaggatacattgttgaacgcagagaactaccagatggccggtggctaaagtgcaattatactaatatacaagaaacatactttgaagtaactgaacttactgaagatcagcgttatgaattccgggtttttgcaaggaatgctgctgactcagttagtgagccatctgaatccactgggcctattatagttaaagatgatgttgagcctccaagagttatgatggatgtcaagttccgagacgttattgttgtcaaagctggagaggtccttaagataaatgcagacattgcagggcgacctctgccagtaatttcctgggccaaggatggtatagaaattgaagaaagagcaagaacagaaatcatctcaacagacaatcatactttgttaacagttaaagactgtataagacgagacactgggcaatatgtactaacactgaagaatgttgccggcactcggtctgtggccgttaattgcaaagtacttgataagcctggtccaccagcaggaccacttgaaataaatggcctcactgctgagaaatgctctctttcctggggacgtccccaagaagatggtggtgcagatatcgactattaccatcgtaaaaaacgtgaaacaagccaccttgcatggacaatatgtgaaggagagttacagatgacatcctgtaaagtaaccaagttactcaaaggcaatgaatatatatttagagtaactggtgttaataaatatggtgttggtgagcccctagagagtgtagctataaaggcactagatccatttacagttccaagtccacccacgtctttggaaattacttctgtgaccaaagaatctatgacactttgctggtcaagacccgagagtgatggaggtagtgaaatatctggatatataattgaaaggcgagagaaaaatagcctaagatgggtgcgtgtaaacaaaaaaccagtttatgatctaagagtgaaatcaacaggacttcgggaaggatgtgaatatgaatatcgtgtttatgcagaaaatgctgctggcctaagtcttccaagtgaaacctctcccttaattagggcagaagatccagtgttcctaccatctcctccatccaaacccaaaattgtggactcaggcaagacaactataactattgcctgggttaagccgctgtttgatggtggggccccgataactggatatactgtagaatacaaaaaatctgatgacactgactggaaaacttccattcagagcttacgagggacagaatatacaataagcggactaacaacaggagctgaatatgttttcagagtaaaatctgtcaataaggttggtgctagtgaccccagtgatagctctgaccctcagatagcaaaggaaagagaagaagaacctttatttgatattgacagtgaaatgaggaagaccttgattgtcaaggctggtgcctcatttaccatgactgtgcctttccgaggaagaccagtacccaatgtcttgtggagtaagccagacactgacctccgtactagagcttatgttgataccacagactctcgtacatcactgaccattgaaaatgccaacagaaatgactctggaaagtacacattaacaattcagaatgttttgagtgctgcttcactgaccttagttgtcaaagttttagataccccaggtcctccaaccaacattactgtgcaagatgtaaccaaagagtctgcagtgttatcctgggatgttcctgaaaacgatggtggagcaccagtgaagaattaccacatagaaaaacgtgaggccagcaagaaagcatgggtctctgtgaccaacaactgtaaccgcctctcctacaaagttaccaatttacaagaaggagctatctattacttcagagtctctggagaaaatgagtttggtgttggtataccagctgaaacaaaggaaggagtaaaaataacagaaaaaccaagcccacctgaaaaacttggagtaacaagtatatccaaagacagtgtttccctgacctggctgaagcctgaacatgatggcggaagcagaattgtacactatgtcgttgaagcactagaaaaaggacagaaaaactgggttaaatgtgcagtggcaaagtcaacccatcacgttgtttccggtctgagagagaattctgaatactttttccgagtgtttgctgaaaatcaagctggcctgagtgacccgagagagcttctgcttcctgttcttattaaggagcaactagaaccacctgaaattgatatgaagaatttcccaagtcacactgtatatgttagagctggttcaaaccttaaagttgacattccaatctctggaaaaccacttcccaaagtgaccttatcaagagatggtgtcccccttaaggcaaccatgagatttaataccgaaattactgctgagaacctgaccatcaatctcaaagaaagtgttacagctgacgctgggagatatgaaatcactgctgccaactccagtggtacaaccaaagctttcattaacattgttgtgctagacaggcctggtcctccaactggccctgttgttattagtgatataactgaagaaagtgtgactctcaaatgggagccacctaagtatgacggtggaagtcaagttaccaactacattctactcaaaagagaaacaagtactgcagtgtggactgaagtgtctgcaacagttgcaagaaccatgatgaaagtcatgaaactgaccacaggagaagaataccaattccgcatcaaggcagaaaaccgctttggcatcagtgatcatatagattcagcttgtgtgactgtcaaactaccatacacaacacctggaccaccatctacaccatgggtcactaatgttactcgagaaagcatcactgtgggctggcatgaaccagtgtcaaatggaggcagtgcagtcgtaggctatcacctggaaatgaaagacagaaacagtattttatggcaaaaagccaacaaactggtcatccgcacaactcacttcaaagtcacaacaatcagtgctggacttatttatgaattcagggtgtatgcagaaaatgctgctggagttggaaaacctagccatccttctgaaccagtcttggcaattgatgcttgtgaacccccaagaaatgttcgtatcactgatatttcaaagaactctgtcagcctttcatggcaacaaccagctttcgatggaggtagcaagattacaggctacattgttgagagacgtgaccttccagatggcagatggaccaaggccagcttcaccaatgttactgaaactcaattcaccatctctggcttgactcagaattcccagtatgaattccgtgtctttgctaggaatgctgttggttccattagcaatccatctgaggttgtagggcccattacttgcatcgattcttatggtggtcctgtaattgatttgcctctagaatatacagaagttgtcaaatacagagcaggtacatctgtgaagctcagagctggcatttctggcaaacctgcgcctactattgagtggtataaagatgataaagaattacaaaccaatgcactggtgtgtgttgaaaataccacggacctcgcatctatactcatcaaagatgccgatcgccttaatagtggatgctatgaattaaaactaaggaatgccatggcgtcagcctcagccaccatcagagtacagatccttgacaaaccaggcccacctggtggaccaattgaatttaagactgtaactgctgagaagatcacccttctctggcggcctccagctgatgatggtggtgcaaaaatcactcactacattgtggaaaagcgtgagacaagccgcgttgtgtggtctatggtgtctgaacatttggaagagtgcatcattacaaccaccaaaattatcaaaggaaatgaatacatcttccgggtccgagccgtgaacaaatatggaattggcgagccactggaatctgattccgttgtagccaagaacgcatttgttacacctgggccaccaggcataccagaagtgacaaagattaccaagaattcgatgactgttgtatggagcaggccaattgcagatggcggtagtgatataagtggctatttccttgaaaaacgagacaagaagagcctaggatggtttaaagtactaaaagagactatccgtgacaccagacaaaaagtaacaggactcacagaaaacagtgactatcaatacagagtttgtgctgtaaacgctgctggacagggtccattttctgaaccatctgaattctacaaagctgctgatcctattgatcctccaggtccacctgctaagataagaatcgcagattcaaccaagtcatccatcacccttggctggagtaagcctgtctatgatgggggcagtgctgttactgggtatgttgtcgagataagacaaggagaggaagaggaatggactactgtctctaccaaaggagaggtcagaactacagaatatgtggtatccaacctgaaacctggagtcaattactacttccgggtatctgctgtaaactgtgctggacaaggagaacctatagaaatgaatgaacctgtacaagctaaagatatacttgaggcaccagagattgacctggatgtggctctcagaacttctgttattgccaaagctggtgaagatgtacaagtgttgattccctttaaaggcagacctccacctactgtcacatggagaaaagatgagaagaatcttggcagtgatgccagatacagcattgaaaacactgattcatcctcattactcaccattcctcaagttactcgcaatgatacaggaaaatatattctcacaatagaaaatggagttggtgaacctaagtcttcaactgtgagtgttaaagtgcttgacacaccagctgcctgccagaaactacaggttaaacatgtttctcgaggcacagtcactttgctctgggatcctcctctcattgatggaggatctccaataattaattatgtcattgaaaagagagatgccaccaagagaacatggtctgtcgtgtcacacaaatgttctagcacatccttcaagctaatagatttgtcggagaagactccattcttcttcagagttcttgcagaaaatgaaattggaattggggaaccctgtgaaactacagagccagtgaaggctgctgaagtaccagctcctatacgtgatctctcaatgaaagactcaacaaagacatctgtcatcctcagctggaccaaacctgactttgatggtggtagcgtcatcacagaatatgttgtagaaaggaaaggtaaaggtgaacagacgtggtcccacgctggcataagtaagacatgtgaaattgaggttagccaacttaaggagcagtcagtcctggagttcagagtgtttgccaaaaatgagaaaggactgagtgatcctgtcactattgggccaattacagtgaaagaacttattattacacctgaagttgacctgtcagatatccctggggcacaagtcactgtgagaattgggcacaatgtgcaccttgaattaccttataagggaaaacccaaaccatccatcagttggctgaaagatggcttgccactgaaagaaagtgaatttgttcgcttcagtaaaactgaaaacaaaattactttgagtattaagaatgccaagaaggagcatggaggaaaatacactgttattcttgataatgcagtgtgtagaattgcagtccccattacagtcatcacccttggcccaccatcaaagcccaaaggacccattcgatttgatgaaatcaaggctgatagtgtcatcctgtcatgggatgtacctgaagataatggaggaggagaaattacttgttacagcatcgagaagcgggaaacttcacaaactaactggaagatggtgtgttcaagtgttgccagaacgactttcaaagttcctaatctagtcaaagatgctgaataccagtttagagtgagagcagaaaacagatacggagtcagccaaccacttgtctcaagcattattgtggcaaaacaccagttcaggattcctggtcccccaggaaagccagttatatacaatgtgacttctgatggcatgtcactaacttgggatgctccagtttatgatggtggttcagaagttactggattccatgttgaaaagaaagaaagaaatagcatcctctggcaaaaagttaatacatcaccaatctctggaagagaatatagagccactggactggtagaaggtctggattaccaattccgtgtatatgctgaaaattctgctggcctaagctcacctagtgacccaagcaaatttaccttagctgtttctccagtagacccacctggcactcctgactacattgatgtcacccgggaaaccatcacacttaaatggaacccaccattgcgtgatggaggcagtaagattgtgggctatagcattgagaaacggcaaggaaatgaacgctgggtgagatgcaactttactgacgtcagtgaatgtcagtacacagttacaggactcagtcctggggatcgctatgagttcagaataattgcaagaaatgctgttggaactataagcccgccctcacagtcttctggcattattatgacaagagatgaaaatgttccaccaatagtagagtttggccctgaatactttgatggtctcattattaagtccggagagagccttagaattaaagctttggtacaaggaagaccagtgcctcgagtaacttggttcaaagatggagtggaaatcgaaaagaggatgaatatggaaataaccaacgtacttggatccaccagcctatttgttagagatgctactcgggaccatcgtggtgtatacacagtggaagccaaaaatgcatctggttctgcaaaagcagaaattaaagtgaaagtacaagatacaccaggaaaagtagttgggccaataagattcaccaatattactggggagaagatgactctgtggtgggatgccccactcaatgacggttgtgctcccataacccactacatcattgaaaaacgggaaaccagcagacttgcctgggcactaattgaggataaatgtgaagcccaaagttacactgccattaaactaataaacggcaatgaataccaattccgtgtttctgcagttaacaagtttggtgttggcaggccacttgattctgatccagtggttgctcaaatacaatatactgttcctgatgcccctggcattccagaacctagcaacataacaggcaacagcattaccctgacatgggcaaggccagaatcagatggtggcagtgaaattcaacagtatatccttgaaagaagagaaaagaaaagcacaagatgggtaaaagtgatcagcaaacgaccaatctctgaaacaagattcaaagtcactggtctgacagaaggcaatgagtatgaattccatgtcatggctgaaaatgctgcaggagttggacctgcaagtggcatctcaagactcattaaatgtagagagcccgtcaacccaccaggtcctcccacagtggtcaaagtaacagacacatcaaagacaactgtgagcttagaatggtccaaaccagtgtttgatggtggcatggaaataattgggtatattattgaaatgtgtaagaccgacttaggagactggcacaaggtgaatgcagaggcatgtgtgaaaacaagatatacagtcactgatctacaagcaggtgaagaatacaaattccgagttagtgctatcaatggtgctggaaaaggcgacagctgtgaagtgactggcacaattaaagcagttgaccggttaacagctcctgagttagacatagatgcaaacttcaaacagactcatgttgttagagctggggccagtattcgcctcttcattgcctaccaaggtagacctactcctacagctgtgtggagcaaaccagactctaaccttagccttcgggctgatatccatacaacagattccttcagcaccctcactgtggaaaactgcaacagaaatgatgcagggaaatatacccttactgtggaaaacaacagtggtagtaagtcaatcacattcaccgtgaaagtgctagacactccaggcccacctggcccaattaccttcaaagatgtgacccggggatctgctacattgatgtgggatgcccctcttcttgacggtggtgcccgaatccatcattatgtggtagagaaacgagaggcaagtcgccgtagttggcaggttatcagtgaaaaatgcactcgtcagatcttcaaggtcaatgacctggccgaaggtgttccgtactatttccgtgtttctgcagtaaatgagtatggtgttggtgagccctatgaaatgccagaaccaattgtagccacggaacagcctgctccacctaggagacttgatgttgttgatactagcaaatcctccgcagtcttagcttggcttaaacctgaccacgatggaggcagccggatcactggctacctgcttgaaatgagacaaaagggatctgacctctgggttgaagctggtcacaccaaacagctaactttcacagtagagcgtcttgttgagaaaactgaatatgaattccgtgtgaaggccaagaatgatgctggctatagtgaacccagagaagccttctcttctgtcatcattaaggagcctcaaatcgagcccactgctgacctcactggaattaccaatcagcttataacttgcaaagcaggaagcccatttaccattgacgtaccaatcagtggtcgtcctgcccccaaagtaacatggaaactggaagaaatgagacttaaagagacagatcgagtgagcattacaacaacaaaagacagaaccacactgactgtaaaggacagcatgagaggtgactctggaagatacttcttgaccctggaaaatacagctggtgttaaaacatttagcgtcacagttgtggtcattggaaggccaggtccagtaaccggccccattgaggtctcatctgtctcagctgaatcgtgtgtcctgtcatggggagaacctaaagatggaggaggcactgaaattactaattacatagttgaaaagcgtgaatcgggtacaacagcttggcagcttgtcaattccagtgtcaagcgcactcaaattaaagtcactcatctcacaaaatacatggaatattctttccgtgtcagttcagagaacagatttggtgtcagcaaacctctagaatcagcaccaataattgctgaacatccatttgtcccaccaagcgctcctaccagacctgaggtctaccatgtgtctgccaatgccatgtctattcgttgggaagaaccctaccacgatggtggcagtaaaatcattggctactgggttgagaagaaagaacgtaatacaattctttgggtgaaagaaaacaaagtgccatgcttagagtgcaactacaaagtaactggtttagtagaaggactggaatatcagttcagaacttatgcactcaatgctgcaggtgttagcaaggccagcgaagcttcaagacctataatggctcaaaatccagttgatgcaccaggcagaccagaggtgacagatgtcacaagatcaacagtatcactgatttggtctgccccagcgtatgatggaggcagcaaggttgtgggctacatcatagagcgtaagccagtcagtgaggtaggagatggtcgctggctgaagtgcaactacaccattgtatctgacaatttcttcaccgtgactgctctcagtgaaggagacacttatgagttccgtgtgttagccaagaatgcagcaggcgtaattagcaaagggtctgaatctacaggccctgtcacttgccgagatgaatacgctccacccaaagccgaactggatgcccgattacacggtgatctggttaccatcagagcaggttctgatcttgttctggatgctgcagttggtggcaaacctgaacccaaaattatctggaccaaaggagacaaggagctagatctctgtgaaaaagtctctttgcagtatactggcaaacgagcaactgctgtgatcaagttctgtgacagaagtgacagtggaaaatacactttaacagtgaaaaatgccagcgggaccaaggccgtgtctgtcatggtcaaagtgcttgattcccctggcccatgtggaaagctcaccgtcagcagagtaacacaggagaagtgcactttagcctggagccttccgcaggaagacggaggagcagaaatcactcactacatcgtggaaagacgcgagactagcaggctcaactgggtgattgttgaaggcgaatgcccaaccctatcctatgtcgttaccaggctcatcaagaacaatgagtacatattccgagtgagggcagtaaacaaatatggccctggtgtgcctgttgaatcagagccaattgtagccagaaactcattcactattccatcaccacccggcatacctgaagaagttgggactggcaaagagcatatcatcattcagtggacaaaacctgaatctgatggtggcaatgaaatcagcaactacctagtagacaaacgtgagaaggagagcctgcgctggacacgtgtcaacaaagactatgtggtgtatgataccaggctgaaggtgaccagcctgatggagggttgtgattaccagttccgggtgaccgcagtgaatgcagctggtaacagtgagcccagcgaacgttccaacttcatctcatgcagagaaccatcatatacccctggaccaccttctgctccaagagttgtggataccaccaaacacagcattagtttggcatggaccaaacccatgtacgatggtggtactgacattgtaggatatgttctggaaatgcaagagaaggacactgatcagtggtaccgagtgcataccaatgccacaataagaaatactgaattcactgtgccagaccttaaaatgggccagaaatattccttcagagttgctgccgtgaacgtgaagggtatgagcgaatacagcgaatcaattgctgaaattgagcccgtggaaagaatagaaataccagatcttgagcttgcagatgatctaaagaagactgtgaccatcagggctggggcctccttgcgcttgatggtgtctgtatctggaagaccacctcctgtcataacgtggagcaagcagggcattgaccttgcaagccgggcaattattgacaccactgagagctactcattgctaatagtggacaaagttaatcggtacgatgctggaaaatacacaattgaagctgaaaaccaatctggcaagaaatcagcaacagtccttgttaaagtctatgatactcctggtccctgtccttcagtgaaagttaaggaagtatcaagagattctgtgactataacttgggaaattcccacgattgatggtggagctccaatcaacaattacatcgttgagaagcgtgaagctgctatgagagcattcaaaacagtaactaccaaatgcagcaagacactttacagaatttctggacttgtagaaggaaccatgcactatttcagagtgctgccagaaaatatttatggcattggagaaccttgtgaaacatctgatgcagtactggtctcagaagtgcctttggtgcctgcaaagctagaagtggtcgatgtcaccaaatccactgttacccttgcctgggaaaaaccactctacgatggtggtagccgactcactggatatgttctcgaggcctgcaaagctggcacagagagatggatgaaggttgtcaccttaaaacccacagtcctagagcacactgttacttccttaaatgaaggtgaacaatacttatttagaataagggcacaaaatgagaaaggtgtgtcagaaccaagagagactgtcacagccgtgactgtacaagacctcagagtgttgccaacaatcgatctttctacaatgcctcagaagaccatccatgtcccagctggcagaccagtagagctggtgatacctattgctggccgtccacctcctgctgcttcctggttctttgctggttctaaactgagagaatcagagcgtgtcacagttgaaactcacactaaagtagctaaattaaccatccgtgaaaccactatcagagatactggagaatacacacttgaattgaagaatgttaccggaactacttcagaaaccattaaagttatcattcttgacaagcctggtccaccaacaggacctattaagattgatgaaattgatgctacatcaattaccatttcctgggaaccacctgaattggacggtggtgctccactgagtggttatgtggtagaacaacgtgacgctcatcgtccaggatggctgcccgtttctgaatcagtgactaggtccacgtttaagtttaccagactcaccgaaggaaatgagtatgtgttccgtgtggctgcaacaaaccgcttcgggattggctcttacttgcagtctgaggtcatagagtgtcgcagcagcatccgtattcctggacccccagaaacattacagatatttgatgtttcccgtgatggcatgacacttacttggtacccaccagaggatgacggtggctcccaagtgactggatatattgtggagcgcaaagaagtgagagcagatcgatgggtccgtgtaaataaagtacctgtgacaatgacacggtaccgctccactggccttactgaaggcttagaatatgaacaccgtgtcacagccattaatgcaagagggtctgggaaaccaagtcgtccttccaaacccatcgttgccatggatccaattgctcctccaggaaagccacaaaacccaagagttactgatacaacaaggacatcagtctccctggcctggagtgttccagaagatgaaggaggatctaaagtcacaggctacttgattgaaatgcaaaaagtagatcaacatgaatggaccaagtgtaacaccactccaaccaagattcgagagtatactctaacacacctacctcagggtgcagaatacaggttccgcgtcctagcttgtaatgctggtggacctggtgagcctgctgaggtaccaggaacagtcaaagtcactgaaatgcttgaatatcctgattatgaacttgatgaaagataccaagaaggtatctttgtaaggcaaggtggcgtcatcagacttaccataccaatcaaaggaaaaccattcccaatatgtaaatggaccaaggaaggccaggatattagtaagcgtgccatgattgcaacatctgaaacacacactgagcttgtgatcaaagaagcagacaggggtgattctggcacttatgacctggttctggaaaataaatgtggcaagaaggctgtctacatcaaggtcagggtgataggaagtcccaacagtccagaagggccactggaatatgatgacatccaagtccgctctgtgagggtcagctggagacctcctgctgatgatggtggtgctgacatcttaggctacatcctcgagagacgagaagtgcctaaagccgcctggtataccattgattccagagtccgaggtacatctctggtggtaaaaggcctcaaagagaatgtagaataccatttccgtgtttcagcagaaaaccagtttggcataagcaaacccttgaaatctgaggaaccagtcacaccaaaaacaccattgaatcctccagaacctccaagcaatcctccagaagtactcgatgtaaccaagagttctgttagcttgtcctggtcccggcccaaagatgatggtggttctagagtcacaggctactacatcgaacgcaaagagacatccactgacaagtgggtcagacacaacaagactcagatcaccaccacaatgtacactgtcacagggcttgttcccgatgctgagtatcagttccgcatcatcgcacagaatgatgttggcctgagtgagaccagccctgcttctgaaccagttgtttgcaaagatccatttgataaaccaagccaaccaggagaacttgagattctttcaatatccaaagatagtgtcactctacagtgggagaaacctgaatgtgatggtggtaaagaaattcttggatactgggttgaatatagacagtctggagacagtgcctggaagaagagcaataaggaacgtattaaggacaagcaattcacaataggaggtttgctggaagctactgagtatgaattcagggtttttgctgagaatgagactgggctgagcagacctcgcagaactgctatgtctataaagactaaactcacatctggagaggccccaggaatacgcaaagaaatgaaggatgttaccacaaaattgggtgaagctgctcaactctcatgccagattgttggaaggcctcttcctgacattaaatggtacagatttggtaaagagctcatacaaagccggaaatacaaaatgtcttcagatggacgcacacacactcttacagtaatgacagaggaacaggaagatgaaggtgtttatacctgcatagccaccaatgaggttggagaagtagaaaccagtagtaagcttctcctgcaagcaacaccgcagttccatcctggttacccactgaaagagaaatattatggagctgtgggttccacacttcggcttcatgttatgtacattggtcgtccagtacctgccatgacttggttccatggtcagaaacttttgcaaaactcagaaaacattactattgaaaacactgagcactatactcatcttgtcatgaagaatgtccaacgtaagactcatgctgggaaatacaaagtccagctcagcaatgtttttggaacagttgatgccatccttgatgtggaaatacaagataaaccagacaaacctacaggaccaattgtgatcgaagctctattgaagaactccgcagtgatcagctggaaaccacccgcagatgacggaggctcctggatcaccaactatgtggtggaaaaatgtgaggccaaggagggggctgaatggcaattggtgtcttcagccatctcagtgacaacctgtagaattgtgaacctcacagaaaatgctggctattacttccgggtttcagctcagaacactttcggcatcagtgaccctctagaagtgtcctcagttgtgatcattaagagtccatttgaaaagccaggtgctcctggcaaaccaactattactgctgtcacaaaagattcttgtgttgtggcctggaagccacctgccagtgatggaggtgcaaagattagaaattactaccttgagaagcgtgagaagaagcagaataaatggatttctgtgacaacagaagaaattcgagaaactgtcttttcagtgaaaaaccttattgaaggtcttgaatacgagtttcgtgtgaaatgtgaaaatctaggtggggaaagtgaatggagtgaaatatcagaacccatcactcccaaatctgatgtcccaattcaggcaccacactttaaagaggaactgagaaatctaaatgtcagatatcagagcaatgctaccttggtctgcaaagtgactggtcatccaaaacctatcgtcaaatggtacagacaaggcaaagaaatcattgcagatggattaaaatataggattcaagaatttaagggtggctaccaccagctcatcattgcaagtgtcacagatgatgatgccacagtttaccaagtcagagctaccaaccaagggggatctgtgtctggcactgcctccttggaagtggaagttccagctaagatacacttacctaaaactcttgaaggcatgggagcagttcatgctctccgaggtgaagtggtcagcatcaagattcctttcagtggcaaaccagatcctgtgatcacctggcagaaaggacaagatctcattgacaataatggccactaccaagttattgtcacaagatccttcacatcacttgttttccccaatggggtagagagaaaagatgctggtttctatgtggtctgtgctaaaaacagatttggaattgatcagaagacagttgaactggatgtggctgatgttcctgacccacccagaggagtcaaagttagtgatgcctcacgagattctgtcaacttaacatggactgagccagcctctgatggtggcagcaaaatcaccaactacattgttgaaaaatgtgcaactactgcagaaagatggctccgtgtaggacaggcccgagaaacacgttataccgtgatcaacttatttggaaaaacaagttaccagttccgggtaatagctgaaaataaatttggtctgagcaagccttcagagccttcagaaccaaccataaccaaagaagataagaccagagctatgaactatgatgaagaggtagatgaaaccagggaagtctccatgactaaagcatctcactcttcaaccaaggaactctatgagaaatatatgattgctgaagatcttgggcgtggtgagtttggaattgtccatcgttgtgttgaaacatcctcaaagaagacatacatggccaaatttgttaaagtcaaagggactgatcaggttttggtaaagaaggaaatttccattctgaatattgctaggcatagaaacatcttacacctccatgaatcatttgaaagcatggaagaattagttatgatctttgagtttatatcaggacttgacatatttgagcgcattaacacaagtgcttttgaacttaatgaaagagaaattgtaagttatgttcaccaggtctgtgaagcacttcagtttttacacagtcataatattggacactttgacattagaccagaaaatatcatttaccaaaccagaagaagctctaccattaaaatcatagaatttggtcaagcccgtcagctgaaaccaggggacaacttcaggcttctattcactgccccagaatactatgcacctgaagtccaccagcatgatgttgtcagcacagccacagacatgtggtcacttggaacactggtatatgtgctattgagtggtatcaacccattcctggctgaaactaaccaacagatcattgagaatatcatgaatgctgaatatactttcgatgaggaagcattcaaagagattagcattgaagccatggattttgttgaccggttgttagtgaaagagaggaaatctcgcatgacagcatcggaggctctccagcacccatggttgaagcagaagatagaaagagtcagtactaaagttatcagaacattaaaacaccggcgttattaccacaccctgatcaagaaagacctcaacatggttgtgtcagcagcccggatctcctgtggtggtgcaattcgatctcagaagggagtgagtgttgctaaagttaaagtggcatccattgaaattggcccagtttctgggcagataatgcatgcagttggtgaagaaggaggacatgtcaaatatgtatgcaaaattgaaaattatgatcagtctacccaagtgacttggtactttggtgtccgacagctggagaacagtgagaaatacgaaatcacctacgaagatggagtggccatcctctatgtcaaagacattaccaaattagatgatggtacctacagatgcaaagtagtcaatgactatggtgaagacagttcttatgcagagctatttgttaaaggtgtgagagaagtctatgactattactgccgtagaaccatgaagaaaattaagcgcagaacagacacaatgagactcctggaaaggccaccagaatttaccctgcctctctataataagacagcttatgtaggtgaaaatgtccggtttggagtaactataactgtccacccagagcctcatgtaacatggtataaatcaggtcagaaaatcaaaccaggtgacaatgacaagaagtacacatttgagtcagacaagggtctttaccaattaacaatcaacagtgtcactacagatgatgacgctgaatatactgttgtggcaaggaacaaatatggtgaagacagctgtaaagcaaagctgacagtaaccctacacccacctccaacagatagtaccttaagacccatgttcaaaaggttactggcaaatgcagaatgccaagaaggccaaagtgtctgctttgagatcagagtgtctggcatccccccaccaacattaaaatgggagaaagatggtcagccactgtccctcgggcctaacattgaaattatccatgaaggcttggattattatgctctgcacatcagggacactttgcctgaagacacgggttattatagagtcacagccactaacacagctgggtccaccagctgccaggctcacctacaagtggaacgcctgaggtacaagaaacaggaattcaagagtaaggaggagcatgagcgacacgtacaaaaacaaattgacaaaaccctcagaatggctgaaattctttctggaactgaaagtgtaccactgacacaggtagctaaagaggctctgagagaagctgctgtcctttataaaccggctgtaagcaccaagactgtaaaaggggaattcagacttgagatagaagaaaagaaggaggagagaaaactccggatgccttatgatgtaccagagccacgcaagtataagcagactaccatagaagaagaccaacgcatcaagcagttcgtgcccatgtctgacatgaagtggtataaaaagatacgtgatcagtatgaaatgcctgggaaacttgacagagttgtacagaaacgacccaagcgcatccgcctttcaagatgggaacagttctatgtgatgcctcttccacgcattacagatcaatacagacctaaatggcgtattcctaaactgtcccaagatgatcttgagatagtgagaccagcccgccggcgtacaccttctcctgattatgacttttactaccgacctagaagacgttctcttggggacatctctgatgaagaattactcctccccattgatgactacttagcaatgaaaagaacagaggaagagaggctgcgtcttgaagaagagcttgagttaggtttttcagcttcacccccaagtcgaagccctccacactttgagctttctagcctacgttactcttcaccacaagctcatgtcaaggtggaggaaacaagaaaaaacttcaggtattcaacctatcacatcccaacgaaggctgaagctagtacaagttatgcagaactgagggaacggcatgcccaggctgcgtacagacagccaaagcaacggcaaagaatcatggctgagagggaggatgaagagttgcttcgcccagttacgaccacccagcatctctcagaatacaaaagcgaacttgacttcatgtcaaaggaggaaaagtctagaaagaaatcaaggcgacaaagagaagtgacagaaataacagaaattgaggaagaatacgaaatctcaaaacatgctcaaagagaatcatcctcatctgcgtctagactactgagacgacggcgctccctgtctccaacttatattgagttaatgaggccagtgtctgagctgatccggtcacgtccacaaccggctgaggaatacgaagatgacacagaaagaaggtcacctactccagagagaactcgcccacgatcccccagccctgtgtctagtgagagatcactctcgagatttgagaggtctgcaagatttgatatcttttccaggtatgagtccatgaaagctgctttaaaaactcagaagacatcagaaaggaagtatgaagttttgagtcagcagcctttcacactggaccatgcccctcgaatcacactgagaatgcgctcgcacagggtaccatgtggccaaaatacacgttttattttaaatgttcagtctaagccaactgccgaggttaaatggtaccacaatggtgtggaactccaagaaagcagtaagattcattacaccaacacgagtggagtcctcaccctggaaattctggactgtcatactgatgacagtggaacctaccgtgctgtgtgcaccaactacaagggcgaagcttctgactatgcaacgttggacgtgacaggaggggattataccacctatgcttcccaacgcagagatgaagaggtccccagatctgttttccctgagctgacaagaacagaggcgtatgctgttccatcatttaagaaaacatctgagatggaagcttcgtcttctgtcagggaagtgaaatcacagatgacggagacaagggaaagtctctcctcatatgaacactctgcatctgcagaaatgaaaagtgctgcattagaagaaaagtcactggaagaaaaatccacaaccagaaagatcaagacgactttggcagcaagaattctaacaaagccacggtccatgaccgtctacgagggcgagtctgcaaggttttcttgtgacaccgatggtgagccggtaccaactgtgacctggctgcgtaaaggacaagtgctaagtacttctgcccgccaccaagtgaccaccacaaagtacaaatcaacctttgagatctcttcagtccaggcttccgatgagggcaattacagcgtggtggtagaaaacagtgaagggaaacaagaagcagagttcactctgactattcaaaaggccagggtaactgaaaaggctgtgacatcaccaccaagagtcaaatccccagagcctcgggtgaaatccccagaagcagttaagtctccaaaacgagtgaaatctccagaaccttctcacccgaaagccgtatcacccacagagacaaaaccaacaccaagagagaaagttcagcacctcccagtctctgccccaccaaagattactcagttcctgaaagcagaagcttctaaagagattgcaaaactgacctgtgtggttgaaagcagtgtattaagggcaaaagaggtcacctggtataaagatggcaagaaactgaaggaaaatgggcatttccagtttcattattcagcagatggtacctatgagctcaaaatcaataacctcactgaatctgatcaaggagaatatgtttgtgagatttctggtgaaggtggaacgtctaaaaccaacttacaatttatggggcaagcctttaagagtatccatgagaaggtatcaaaaatatcagaaactaagaaatcagatcagaaaaccactgagtcaacagtaaccagaaaaactgaaccaaaagctcctgaaccaatttcctcaaaaccagtaattgttactgggttgcaggatacaactgtttcttcagacagtgttgctaaatttgcagttaaggctactggagaaccccggccaactgccatctggacaaaagatggaaaggccattacacaaggaggtaaatataaactctctgaagacaagggagggttcttcttagaaattcataagactgatacttctgacagtggactttatacttgtacagtaaaaaattcagctggatctgtgtcctctagctgcaaattaacaataaaagctataaaagatactgaggcacagaaagtctctacacaaaagacttctgaaattacacctcagaagaaagctgttgtccaagaggaaatttcccaaaaagccctaaggtctgaagaaattaagatgtcagaggcaaaatctcaagaaaagttagccctcaaagaggaagcttcaaaggttctgatttctgaagaagtcaagaaatcagcagcaacctccctggaaaaatccattgtccatgaggaaatcactaaaacatcacaggcatcagaagaagtcagaactcatgctgagattaaagcattttctactcagatgagcataaacgaaggtcaaagactggttttaaaagccaacattgctggtgccactgatgtgaaatgggtactgaatggcgtagagcttaccaactctgaggagtaccgatatggtgtctcaggcagcgatcagaccctaaccatcaagcaagccagtcacagagatgaaggaatcctcacctgcataagcaaaaccaaggaaggaatcgtcaagtgtcagtatgatttgacactgagcaaagaactctcagatgctccagccttcatctcacagcctagatctcaaaatattaatgaaggacaaaatgttctctttacttgtgaaatcagtggcgagccatcccctgaaatcgaatggtttaaaaacaacctgccaatttctatttcttcaaatgtcagcataagccgctccagaaatgtatactcccttgaaatccgaaatgcatcagtcagcgacagtggaaagtacacaattaaggccaaaaatttccgtggccagtgttcagctacagcttccttaatggtccttcctctagttgaagaaccttccagagaggtagtattgagaacaagtggtgacacaagcttgcaaggaagcttctcgtctcagtcagtccaaatgtctgcctccaagcaggaggcctccttcagcagtttcagcagcagcagtgctagcagcatgactgagatgaaatttgcaagcatgtctgcccaaagcatgtcctccatgcaagagtcctttgtagaaatgagttccagcagctttatgggaatatctaatatgacacaactggaaagctcaactagtaaaatgcttaaagcaggcataagaggaattccgcctaaaattgaagctcttccatctgatatcagcattgatgaaggcaaagttctaacagtagcctgtgctttcacgggtgagcctaccccagaagtaacatggtcctgtggtggaagaaaaatccacagtcaagaacaggggaggttccacattgaaaacacagatgacctgacaaccctgatcatcatggacgtacagaaacaagatggtggactttataccctgagtttagggaatgaatttggatctgactctgccactgtgaatatacatattcgatccatttaagagggcctgtgcccttatactctacactcattcttaacttttcgcaaacgtttcacacggactaatctttctgaactgtaaatatttaaagaaaaaaagtagttttgtatcaacctaaatgagtcaaagttcaaaaatattcatttcaatcttttcataattgttgacctaagaatataatacatttgctagtgacatgtacatactgtatatagccggattaacggttataaagttttgtaccatttattttatgacattttacaatgtaagttttgaaactaactgttggtaggagaaagtttcttatggaacgaataccctgctcaacatttaatcaatctttgtgcctcaacatactgttgatgtctaagtatgcctcagtgggttgagaaaatccccattgaagatgtcctgtccacctaaaagagaatgatgctgtgcatatcacttgatatgtgcaccaatacctactgaatcagaaatgtaaggcattggtgatgtttgcatttaccctcctgtaagcaacactttaacgtcttacattttctctgatgatgtcacacaaaattatcatgacaaatattaccagagcaaagtgtaacggccaacactttgttcgctcattttacgctgtctctgacataaggagtgcctgaatagcttggaaaagtaacatctcctggccatcccttcatttaaccaagctattcaagtattcctatgccagagcagtgccaactcttggaggtcccagagtgcagccaatgcctttgtgtggtagttctaaattttaattgcacctgaaaaacctgggcacctaagcaatgagccacagcaaaaagtaaagaacaacaacaaaataaagctgttgttaaattttaaacaatattactaattgcccaaaatgtcaatttgatgtagttcttttcatgcaagtataaattcaattgttagttataattgttggacctccttgagatagtaacaacaaaataaagcaagctatctgcacctcaaaaaaaaa

SEQ ID NO: 2 - protein, 26926 aa, Homo sapiens
MTTQAPTFTQPLQSVVVLEGSTATFEAHISGFPVPEVSWFRDGQVISTSTLPGVQISFSDGRAKLTIPAVTKANSGRYSLKATNGSGQATSTAELLVKAETAPPNFVQRLQSMTVRQGSQVRLQVRVTGIPTPVVKFYRDGAEIQSSLDFQISQEGDLYSLLIAEAYPEDSGTYSVNATNSVGRATSTAELLVQGEEEVPAKKTKTIVSTAQISESRQTRIEKKIEAHFDARSIATVEMVIDGAAGQQLPHKTPPRIPPKPKSRSPTPPSIAAKAQLARQQSPSPIRHSPSPVRHVRAPTPSPVRSVSPAARISTSPIRSVRSPLLMRKTQASTVATGPEVPPPWKQEGYVASSSEAEMRETTLTTSTQIRTEERWEGRYGVQEQVTISGAAGAAASVSASASYAAEAVATGAKEVKQDADKSAAVATVVAAVDMARVREPVISAVEQTAQRTTTTAVHIQPAQEQVRKEAEKTAVTKVVVAADKAKEQELKSRTKEIITTKQEQMHVTHEQIRKETEKTFVPKVVISAAKAKEQETRISEEITKKQKQVTQEAIMKETRKTVVPKVIVATPKVKEQDLVSRGREGITTKREQVQITQEKMRKEAEKTALSTIAVATAKAKEQETILRTRETMATRQEQIQVTHGKVDVGKKAEAVATVVAAVDQARVREPREPGHLEESYAQQTTLEYGYKERISAAKVAEPPQRPASEPHVVPKAVKPRVIQAPSETHIKTTDQKGMHISSQIKKTTDLTTERLVHVDKRPRTASPHFTVSKISVPKTEHGYEASIAGSAIATLQKELSATSSAQKITKSVKAPTVKPSETRVRAEPTPLPQFPFADTPDTYKSEAGVEVKKEVGVSITGTTVREERFEVLHGREAKVTETARVPAPVEIPVTPPTLVSGLKNVTVIEGESVTLECHISGYPSPTVTWYREDYQIESSIDFQITFQSGIARLMIREAFAEDSGRFTCSAVNEAGTVSTSCYLAVQVSEEFEKETTAVTEKFTTEEKRFVESRDVVMTDTSLTEEQAGPGEPAAPYFITKPVVQKLVEGGSVVFGCQVGGNPKPHVYWKKSGVPLTTGYRYKVSYNKQTGECKLVISMTFADDAGEYTIVVRNKHGETSASASLLEEADYELLMKSQQEMLYQTQVTAFVQEPEVGETAPGFVYSEYEKEYEKEQALIRKKMAKDTVVVRTYVEDQEFHISSFEERLIKEIEYRIIKTTLEELLEEDGEEKMAVDISESEAVESGFDLRIKNYRILEGMGVTFHCKMSGYPLPKIAWYKDGKRIKHGERYQMDFLQDGRASLRIPVVLPEDEGIYTAFASNIKGNAICSGKLYVEPAAPLGAPTYIPTLEPVSRIRSLSPRSVSRSPIRMSPARMSPARMSPARMSPARMSPGRRLEETDESQLERLYKPVFVLKPVSFKCLEGQTARFDLKVVGRPMPETFWFHDGQQIVNDYTHKVVIKEDGTQSLIIVPATPSDSGEWTVVAQNRAGRSSISVILTVEAVEHQVKPMFVEKLKNVNIKEGSRLEMKVRATGNPNPDIVWLKNSDIIVPHKYPKIRIEGTKGEAALKIDSTVSQDSAWYTATAINKAGRDTTRCKVNVEVEFAEPEPERKLIIPRGTYRAKEIAAPELEPLHLRYGQEQWEEGDLYDKEKQQKPFFKKKLTSLRLKRFGPAHFECRLTPISDPTMVVEWLHDGKPLEAANRLRMINEFGYCSLDYGVAYSRDSGIITCRATNKYGTDHTSATLIVKDEKSLVEESQLPEGRKGLQRIEELERMAHEGALTGVTTDQKEKQKPDIVLYPEPVRVLEGETARFRCRVTGYPQPKVNWYLNGQLIRKSKRFRVRYDGIHYLDIVDCKSYDTGEVKVTAENPEGVIEHKVKLEIQQREDFRSVLRRAPEPRPEFHVHEPGKLQFEVQKVDRPVDTTETKEVVKLKRAERITHEKVPEESEELRSKFKRRTEEGYYEAITAVELKSRKKDESYEELLRKTKDELLHWTKELTEEEKKALAEEGKITIPTFKPDKIELSPSMEAPKIFERIQSQTVGQGSDAHFRVRVVGKPDPECEWYKNGVKIERSDRIYWYWPEDNVCELVIRDVTAEDSASIMVKAINIAGETSSHAFLLVQAKQLITFTQELQDVVAKEKDTMATFECETSEPFVKVKWYKDGMEVHEGDKYRMHSDRKVHFLSILTIDTSDAEDYSCVLVEDENVKTTAKLIVEGAVVEFVKELQDIEVPESYSGELECIVSPENIEGKWYHNDVELKSNGKYTITSRRGRQNLTVKDVTKEDQGEYSFVIDGKKTTCKLKMKPRPIAILQGLSDQKVCEGDIVQLEVKVSLESVEGVWMKDGQEVQPSDRVHIVIDKQSHMLLIEDMTKEDAGNYSFTIPALGLSTSGRVSVYSVDVITPLKDVNVIEGTKAVLECKVSVPDVTSVKWYLNDEQIKPDDRVQAIVKGTKQRLVINRTHASDEGPYKLIVGRVETNCNLSVEKIKIIRGLRDLTCTETQNVVFEVELSHSGIDVLWNFKDKEIKPSSKYKIEAHGKIYKLTVLNMMKDDEGKYTFYAGENMTSGKLTVAGGAISKPLTDQTVAESQEAVFECEVANPDSKGEWLRDGKHLPLTNNIRSESDGHKRRLIIAATKLDDIGEYTYKVATSKTSAKLKVEAVKIKKTLKNLTVTETQDAVFTVELTHPNVKGVQWIKNGVVLESNEKYAISVKGTIYSLRIKNCAIVDESVYGFRLGRLGASARLHVETVKIIKKPKDVTALENATVAFEVSVSHDTVPVKWFHKSVEIKPSDKHRLVSERKVHKLMLQNISPSDAGEYTAVVGQLECKAKLFVETLHITKTMKNIEVPETKTASFECEVSHFNVPSMWLKNGVEIEMSEKFKIVVQGKLHQLIIMNTSTEDSAEYTFVCGNDQVSATLTVTPIMITSMLKDINAEEKDTITFEVTVNYEGISYKWLKNGVEIKSTDKCQMRTKKLTHSLNIRNVHFGDAADYTFVAGKATSTATLYVEARHIEFRKHIKDIKVLEKKRAMFECEVSEPDITVQWMKDDQELQITDRIKIQKEKYVHRLLIPSTRMSDAGKYTVVAGGNVSTAKLFVEGRDVRIRSIKKEVQVIEKQRAVVEFEVNEDDVDAHWYKDGIEINFQVQERHKYVVERRIHRMFISETRQSDAGEYTFVAGRNRSSVTLYVNAPEPPQVLQELQPVTVQSGKPARFCAMISGRPQPKISWYKEEQLLSTGFKCKFLHDGQEYTLLLIEAFPEDAAVYTCEAKNDYGVATTSASLSVEVPEVVSPDQEMPVYPPAIITPLQDTVTSEGQPARFQCRVSGTDLKVSWYSKDKKIKPSRFFRMTQFEDTYQLEIAEAYPEDEGTYTFVANNAVGQVSSTANLSLEAPESILHERIEQEIEMEMKEFSSSFLSAEEEGLHSAELQLSKINETLELLSESPVYPTKFDSEKEGTGPIFIKEVSNADISMGDVATLSVTVIGIPKPKIQWFFNGVLLTPSADYKFVFDGDDHSLIILFTKLEDEGEYTCMASNDYGKTICSAYLKINSKGEGHKDTETESAVAKSLEKLGGPCPPHFLKELKPIRCAQGLPAIFEYTVVGEPAPTVTWFKENKQLCTSVYYTIIHNPNGSGTFIVNDPQREDSGLYICKAENMLGESTCAAELLVLLEDTDMTDTPCKAKSTPEAPEDFPQTPLKGPAVEALDSEQEIATFVKDTILKAALITEENQQLSYEHIAKANELSSQLPLGAQELQSILEQDKLTPESTREFLCINGSIHFQPLKEPSPNLQLQIVQSQKTFSKEGILMPEEPETQAVLSDTEKIFPSAMSIEQINSLTVEPLKTLLAEPEGNYPQSSIEPPMHSYLTSVAEEVLSLKEKTVSDTNREQRVTLQKQEAQSALILSQSLAEGHVESLQSPDVMISQVNYEPLVPSEHSCTEGGKILIESANPLENAGQDSAVRIEEGKSLRFPLALEEKQVLLKEEHSDNVVMPPDQIIESKREPVAIKKVQEVQGRDLLSKESLLSGIPEEQRLNLKIQICRALQAAVASEQPGLFSEWLRNIEKVEVEAVNITQEPRHIMCMYLVTSAKSVTEEVTIIIEDVDPQMANLKMELRDALCAIIYEEIDILTAEGPRIQQGAKTSLQEEMDSFSGSQKVEPITEPEVESKYLISTEEVSYFNVQSRVKYLDATPVTKGVASAVVSDEKQDESLKPSEEKEESSSESGTEEVATVKIQEAEGGLIKEDGPMIHTPLVDTVSEEGDIVHLTTSITNAKEVNWYFENKLVPSDEKFKCLQDQNTYTLVIDKVNTEDHQGEYVCEALNDSGKTATSAKLTVVKRAAPVIKRKIEPLEVALGHLAKFTCEIQSAPNVRFQWFKAGREIYESDKCSIRSSKYISSLEILRTQVVDCGEYTCKASNEYGSVSCTATLTVTVPGGEKKVRKLLPERKPEPKEEVVLKSVLRKRPEEEEPKVEPKKLEKVKKPAVPEPPPPKPVEEVEVPTVTKRERKIPEPTKVPEIKPAIPLPAPEPKPKPEAEVKTIKPPPVEPEPTPIAAPVTVPVVGKKAEAKAPKEEAAKPKGPIKGVPKKTPSPIEAERRKLRPGSGGEKPPDEAPFTYQLKAVPLKFVKEIKDIILTESEFVGSSAIFECLVSPSTAITTWMKDGSNIRESPKHRFIADGKDRKLHIIDVQLSDAGEYTCVLRLGNKEKTSTAKLVVEELPVRFVKTLEEEVTVVKGQPLYLSCELNKERDVVWRKDGKIVVEKPGRIVPGVIGLMRALTINDADDTDAGTYTVTVENANNLECSSCVKVVEVIRDWLVKPIRDQHVKPKGTAIFACDIAKDTPNIKWFKGYDEIPAEPNDKTEILRDGNHLYLKIKNAMPEDIAEYAVEIEGKRYPAKLTLGEREVELLKPIEDVTIYEKESASFDAEISEADIPGQWKLKGELLRPSPTCEIKAEGGKRFLTLHKVKLDQAGEVLYQALNAITTAILTVKEIELDFAVPLKDVTVPERRQARFECVLTREANVIWSKGPDIIKSSDKFDIIADGKKHILVINDSQFDDEGVYTAEVEGKKTSARLFVTGIRLKFMSPLEDQTVKEGETATFVCELSHEKMHVVWFKNDAKLHTSRTVLISSEGKTHKLEMKEVTLDDISQIKAQVKELSSTAQLKVLEADPYFTVKLHDKTAVEKDEITLKCEVSKDVPVKWFKDGEEIVPSPKYSIKADGLRRILKIKKADLKDKGEYVCDCGTDKTKANVTVEARLIEVEKPLYGVEVFVGETAHFEIELSEPDVHGQWKLKGQPLTASPDCEIIEDGKKHILILHNCQLGMTGEVSFQAANAKSAANLKVKELPLIFITPLSDVKVFEKDEAKFECEVSREPKTFRWLKGTQEITGDDRFELIKDGTKHSMVIKSAAFEDEAKYMFEAEDKHTSGKLIIEGIRLKFLTPLKDVTAKEKESAVFTVELSHDNIRVKWFKNDQRLHTTRSVSMQDEGKTHSITFKDLSIDDTSQIRVEAMGMSSEAKLTVLEGDPYFTGKLQDYTGVEKDEVILQCEISKADAPVKWFKDGKEIKPSKNAVIKTDGKKRMLILKKALKSDIGQYTCDCGTDKTSGKLDIEDREIKLVRPLHSVEVMETETARFETEISEDDIHANWKLKGEALLQTPDCEIKEEGKIHSLVLHNCRLDQTGGVDFQAANVKSSAHLRVKPRVIGLLRPLKDVTVTAGETATFDCELSYEDIPVEWYLKGKKLEPSDKVVPRSEGKVHTLTLRDVKLEDAGEVQLTAKDFKTHANLFVKEPPVEFTKPLEDQTVEEGATAVLECEVSRENAKVKWFKNGTEILKSKKYEIVADGRVRKLVIHDCTPEDIKTYTCDAKDFKTSCNLNVVPPHVEFLRPLTDLQVREKEMARFECELSRENAKVKWFKDGAEIKKGKKYDIISKGAVRILVINKCLLDDEAEYSCEVRTARTSGMLTVLEEEAVFTKNLANIEVSETDTIKLVCEVSKPGAEVIWYKGDEEIIETGRYEILTEGRKRILVIQNAHLEDAGNYNCRLPSSRTDGKVKVHELAAEFISKPQNLEILEGEKAEFVCSISKESFPVQWKRDDKTLESGDKYDVIADGKKRVLVVKDATLQDMGTYVVMVGAARAAAHLTVIEKLRIVVPLKDTRVKEQQEVVFNCEVNTEGAKAKWFRNEEAIFDSSKYIILQKDLVYTLRIRDAHLDDQANYNVSLTNHRGENVKSAANLIVEEEDLRIVEPLKDIETMEKKSVTFWCKVNRLNVTLKWTKNGEEVPFDNRVSYRVDKYKHMLTIKDCGFPDEGEYIVTAGQDKSVAELLIIEAPTEFVEHLEDQTVTEFDDAVFSCQLSREKANVKWYRNGREIKEGKKYKFEKDGSIHRLIIKDCRLDDECEYACGVEDRKSRARLFVEEIPVEIIRPPQDILEAPGADVVFLAELNKDKVEVQWLRNNMVVVQGDKHQMMSEGKIHRLQICDIKPRDQGEYRFIAKDKEARAKLELAAAPKIKTADQDLVVDVGKPLTMVVPYDAYPKAEAEWFKENEPLSTKTIDTTAEQTSFRILEAKKGDKGRYKIVLQNKHGKAEGFINLKVIDVPGPVRNLEVTETFDGEVSLAWEEPLTDGGSKIIGYVVERRDIKRKTWVLATDRAESCEFTVTGLQKGGVEYLFRVSARNRVGTGEPVETDNPVEARSKYDVPGPPLNVTITDVNRFGVSLTWEPPEYDGGAEITNYVIELRDKTSIRWDTAMTVRAEDLSATVTDVVEGQEYSFRVRAQNRIGVGKPSAATPFVKVADPIERPSPPVNLTSSDQTQSSVQLKWEPPLKDGGSPILGYIIERCEEGKDNWIRCNMKLVPELTYKVTGLEKGNKYLYRVSAENKAGVSDPSEILGPLTADDAFVEPTMDLSAFKDGLEVIVPNPITILVPSTGYPRPTATWCFGDKVLETGDRVKMKTLSAYAELVISPSERSDKGIYTLKLENRVKTISGEIDVNVIARPSAPKELKFGDITKDSVHLTWEPPDDDGGSPLTGYVVEKREVSRKTWTKVMDFVTDLEFTVPDLVQGKEYLFKVCARNKCGPGEPAYVDEPVNMSTPATVPDPPENVKWRDRTANSIFLTWDPPKNDGGSRIKGYIVERCPRGSDKWVACGEPVAETKMEVTGLEEGKWYAYRVKTLNRQGASKPSRPTEEIQAVDTQEAPEIFLDVKLLAGLTVKAGTKIELPATVTGKPEPKITWTKADMILKQDKRITIENVPKKSTVTIVDSKRSDTGTYIIEAVNVCGRATAVVEVNVLDKPGPPAAFDITDVTNESCLLTWNPPRDDGGSKITNYVVERRATDSEVWHKLSSTVKDTNFKATKLIPNKEYIFRVAAENMYGAGEPVQASPITAKYQFDPPGPPTRLEPSDITKDAVTLTWCEPDDDGGSPITGYWVERLDPDTDKWVRCNKMPVKDTTYRVKGLTNKKKYRFRVLAENLAGPGKPSKSTEPILIKDPIDPPWPPGKPTVKDVGKTSVRLNWTKPEHDGGAKIESYVIEMLKTGTDEWVRVAEGVPTTQHLLPGLMEGQEYSFRVRAVNKAGESEPSEPSDPVLCREKLYPPSPPRWLEVINITKNTADLKWTVPEKDGGSPITNYIVEKRDVRRKGWQTVDTTVKDTKCTVTPLTEGSLYVFRVAAENAIGQSDYTEIEDSVLAKDTFTTPGPPYALAVVDVTKRHVDLKWEPPKNDGGRPIQRYVIEKKERLGTRWVKAGKTAGPDCNFRVTDVIEGTEVQFQVRAENEAGVGHPSEPTEILSIEDPTSPPSPPLDLHVTDAGRKHIAIAWKPPEKNGGSPIIGYHVEMCPVGTEKWMRVNSRPIKDLKFKVEEGVVPDKEYVLRVRAVNAIGVSEPSEISENVVAKDPDCKPTIDLETHDIIVIEGEKLSIPVPFRAVPVPTVSWHKDGKEVKASDRLTMKNDHISAHLEVPKSVRADAGIYTITLENKLGSATASINVKVIGLPGPCKDIKASDITKSSCKLTWEPPEFDGGTPILHYVLERREAGRRTYIPVMSGENKLSWTVKDLIPNGEYFFRVKAVNKVGGGEYIELKNPVIAQDPKQPPDPPVDVEVHNPTAEAMTITWKPPLYDGGSKIMGYIIEKIAKGEERWKRCNEHLVPILTYTAKGLEEGKEYQFRVRAENAAGISEPSRATPPTKAVDPIDAPKVILRTSLEVKRGDEIALDASISGSPYPTITWIKDENVIVPEEIKKRAAPLVRRRKGEVQEEEPFVLPLTQRLSIDNSKKGESQLRVRDSLRPDHGLYMIKVENDHGIAKAPCTVSVLDTPGPPINFVFEDIRKTSVLCKWEPPLDDGGSEIINYTLEKKDKTKPDSEWIVVTSTLRHCKYSVTKLIEGKEYLFRVRAENRFGPGPPCVSKPLVAKDPFGPPDAPDKPIVEDVTSNSMLVKWNEPKDNGSPILGYWLEKREVNSTHWSRVNKSLLNALKANVDGLLEGLTYVFRVCAENAAGPGKFSPPSDPKTAHDPISPPGPPIPRVTDTSSTTIELEWEPPAFNGGGEIVGYFVDKQLVGTNKWSRCTEKMIKVRQYTVKEIREGADYKLRVSAVNAAGEGPPGETQPVTVAEPQEPPAVELDVSVKGGIQIMAGKTLRIPAVVTGRPVPTKVWTKEEGELDKDRVVIDNVGTKSELIIKDALRKDHGRYVITATNSCGSKFAAARVEVFDVPGPVLDLKPVVTNRKMCLLNWSDPEDDGGSEITGFIIERKDAKMHTWRQPIETERSKCDITGLLEGQEYKFRVIAKNKFGCGPPVEIGPILAVDPLGPPTSPERLTYTERQRSTITLDWKEPRSNGGSPIQGYIIEKRRHDKPDFERVNKRLCPTTSFLVENLDEHQMYEFRVKAVNEIGESEPSLPLNVVIQDDEVPPTIKLRLSVRGDTIKVKAGEPVHIPADVTGLPMPKIEWSKNETVIEKPTDALQITKEEVSRSEAKTELSIPKAVREDKGTYTVTASNRLGSVFRNVHVEVYDRPSPPRNLAVTDIKAESCYLTWDAPLDNGGSEITHYVIDKRDASRKKAEWEEVTNTAVEKRYGIWKLIPNGQYEFRVRAVNKYGISDECKSDKVVIQDPYRLPGPPGKPKVLARTKGSMLVSWTPPLDNGGSPITGYWLEKREEGSPYWSRVSRAPITKVGLKGVEFNVPRLLEGVKYQFRAMAINAAGIGPPSEPSDPEVAGDPIFPPGPPSCPEVKDKTKSSISLGWKPPAKDGGSPIKGYIVEMQEEGTTDWKRVNEPDKLITTCECVVPNLKELRKYRFRVKAVNEAGESEPSDTTGEIPATDIQEEPEVFIDIGAQDCLVCKAGSQIRIPAVIKGRPTPKSSWEFDGKAKKAMKDGVHDIPEDAQLETAENSSVIIIPECKRSHTGKYSITAKNKAGQKTANCRVKVMDVPGPPKDLKVSDITRGSCRLSWKMPDDDGGDRIKGYVIEKRTIDGKAWTKVNPDCGSTTFVVPDLLSEQQYFFRVRAENRFGIGPPVETIQRTTARDPIYPPDPPIKLKIGLITKNTVHLSWKPPKNDGGSPVTHYIVECLAWDPTGTKKEAWRQCNKRDVEELQFTVEDLVEGGEYEFRVKAVNAAGVSKPSATVGPCDCQRPDMPPSIDLKEFMEVEEGTNVNIVAKIKGVPFPTLTWFKAPPKKPDNKEPVLYDTHVNKLVVDDTCTLVIPQSRRSDTGLYTITAVNNLGTASKEMRLNVLGRPGPPVGPIKFESVSADQMTLSWFPPKDDGGSKITNYVIEKREANRKTWVHVSSEPKECTYTIPKLLEGHEYVFRIMAQNKYGIGEPLDSEPETARNLFSVPGAPDKPTVSSVTRNSMTVNWEEPEYDGGSPVTGYWLEMKDTTSKRWKRVNRDPIKAMTLGVSYKVTGLIEGSDYQFRVYAINAAGVGPASLPSDPATARDPIAPPGPPFPKVTDWTKSSADLEWSPPLKDGGSKVTGYIVEYKEEGKEEWEKGKDKEVRGTKLVVTGLKEGAFYKFRVSAVNIAGIGEPGEVTDVIEMKDRLVSPDLQLDASVRDRIVVHAGGVIRIIAYVSGKPPPTVTWNMNERTLPQEATIETTAISSSMVIKNCQRSHQGVYSLLAKNEAGERKKTIIVDVLDVPGPVGTPFLAHNLTNESCKLTWFSPEDDGGSPITNYVIEKRESDRRAWTPVTYTVTRQNATVQGLIQGKAYFFRIAAENSIGMGPFVETSEALVIREPITVPERPEDLEVKEVTKNTVTLTWNPPKYDGGSEIINYVLESRLIGTEKFHKVTNDNLLSRKYTVKGLKEGDTYEYRVSAVNIVGQGKPSFCTKPITCKDELAPPTLHLDFRDKLTIRVGEAFALTGRYSGKPKPKVSWFKDEADVLEDDRTHIKTTPATLALEKIKAKRSDSGKYCVVVENSTGSRKGFCQVNVVDHPGPPVGPVSFDEVTKDYMVISWKPPLDDGGSKITNYIIEKKEVGKDVWMPVTSASAKTTCKVSKLLEGKDYIFRIHAENLYGISDPLVSDSMKAKDRFRVPDAPDQPIVTEVTKDSALVTWNKPHDGGKPITNYILEKRETMSKRWARVTKDPIHPYTKFRVPDLLEGCQYEFRVSAENEIGIGDPSPPSKPVFAKDPIAKPSPPVNPEAIDTTCNSVDLTWQPPRHDGGSKILGYIVEYQKVGDEEWRRANHTPESCPETKYKVTGLRDGQTYKFRVLAVNAAGESDPAHVPEPVLVKDRLEPPELILDANMAREQHIKVGDTLRLSAIIKGVPFPKVTWKKEDRDAPTKARIDVTPVGSKLEIRNAAHEDGGIYSLTVENPAGSKTVSVKVLVLDKPGPPRDLEVSEIRKDSCYLTWKEPLDDGGSVITNYVVERRDVASAQWSPLSATSKKKSHFAKHLNEGNQYLFRVAAENQYGRGPFVETPKPIKALDPLHPPGPPKDLHHVDVDKTEVSLVWNKPDRDGGSPITGYLVEYQEEGTQDWIKFKTVTNLECVVTGLQQGKTYRFRVKAENIVGLGLPDTTIPIECQEKLVPPSVELDVKLIEGLVVKAGTTVRFPAIIRGVPVPTAKWTTDGSEIKTDEHYTVETDNFSSVLTIKNCLRRDTGEYQITVSNAAGSKTVAVHLTVLDVPGPPTGPINILDVTPEHMTISWQPPKDDGGSPVINYIVEKQDTRKDTWGVVSSGSSKTKLKIPHLQKGCEYVFRVRAENKIGVGPPLDSTPTVAKHKFSPPSPPGKPVVTDITENAATVSWTLPKSDGGSPITGYYMERREVTGKWVRVNKTPIADLKFRVTGLYEGNTYEFRVFAENLAGLSKPSPSSDPIKACRPIKPPGPPINPKLKDKSRETADLVWTKPLSDGGSPILGYVVECQKPGTAQWNRINKDELIRQCAFRVPGLIEGNEYRFRIKAANIVGEGEPRELAESVIAKDILHPPEVELDVTCRDVITVRVGQTIRILARVKGRPEPDITWTKEGKVLVREKRVDLIQDLPRVELQIKEAVRADHGKYIISAKNSSGHAQGSAIVNVLDRPGPCQNLKVTNVTKENCTISWENPLDNGGSEITNFIVEYRKPNQKGWSIVASDVTKRLIKANLLANNEYYFRVCAENKVGVGPTIETKTPILAINPIDRPGEPENLHIADKGKTFVYLKWRRPDYDGGSPNLSYHVERRLKGSDDWERVHKGSIKETHYMVDRCVENQIYEFRVQTKNEGGESDWVKTEEVVVKEDLQKPVLDLKLSGVLTVKAGDTIRLEAGVRGKPFPEVAWTKDKDATDLTRSPRVKIDTRADSSKFSLTKAKRSDGGKYVVTATNTAGSFVAYATVNVLDKPGPVRNLKIVDVSSDRCTVCWDPPEDDGGCEIQNYILEKCETKRMVWSTYSATVLTPGTTVTRLIEGNEYIFRVRAENKIGTGPPTESKPVIAKTKYDKPGRPDPPEVTKVSKEEMTVVWNPPEYDGGKSITGYFLEKKEKHSTRWVPVNKSAIPERRMKVQNLLPDHEYQFRVKAENEIGIGEPSLPSRPVVAKDPIEPPGPPTNFRVVDTTKHSITLGWGKPVYDGGAPIIGYVVEMRPKIADASPDEGWKRCNAAAQLVRKEFTVTSLDENQEYEFRVCAQNQVGIGRPAELKEAIKPKEILEPPEIDLDASMRKLVIVRAGCPIRLFAIVRGRPAPKVTWRKVGIDNVVRKGQVDLVDTMAFLVIPNSTRDDSGKYSLTLVNPAGEKAVFVNVRVLDTPGPVSDLKVSDVTKTSCHVSWAPPENDGGSQVTHYIVEKREADRKTWSTVTPEVKKTSFHVTNLVPGNEYYFRVTAVNEYGPGVPTDVPKPVLASDPLSEPDPPRKLEATEMTKNSATLAWLPPLRDGGAKIDGYIISYREEEQPADRWTEYSVVKDLSLVVTGLKEGKKYKFRVAARNAVGVSLPREAEGVYEAKEQLLPPKILMPEQITIKAGKKLRIEAHVYGKPHPTCKWKKGEDEVVTSSHLAVHKADSSSILIIKDVTRKDSGYYSLTAENSSGTDTQKIKVVVMDAPGPPQPPFDISDIDADACSLSWHIPLEDGGSNITNYIVEKCDVSRGDWVTALASVTKTSCRVGKLIPGQEYIFRVRAENRFGISEPLTSPKMVAQFPFGVPSEPKNARVTKVNKDCIFVAWDRPDSDGGSPIIGYLIERKERNSLLWVKANDTLVRSTEYPCAGLVEGLEYSFRIYALNKAGSSPPSKPTEYVTARMPVDPPGKPEVIDVTKSTVSLIWARPKHDGGSKIIGYFVEACKLPGDKWVRCNTAPHQIPQEEYTATGLEEKAQYQFRAIARTAVNISPPSEPSDPVTILAENVPPRIDLSVAMKSLLTVKAGTNVCLDATVFGKPMPTVSWKKDGTLLKPAEGIKMAMQRNLCTLELFSVNRKDSGDYTITAENSSGSKSATIKLKVLDKPGPPASVKINKMYSDRAMLSWEPPLEDGGSEITNYIVDKRETSRPNWAQVSATVPITSCSVEKLIEGHEYQFRICAENKYGVGDPVFTEPAIAKNPYDPPGRCDPPVISNITKDHMTVSWKPPADDGGSPITGYLLEKRETQAVNWTKVNRKPIIERTLKATGLQEGTEYEFRVTAINKAGPGKPSDASKAAYARDPQYPPAPPAFPKVYDTTRSSVSLSWGKPAYDGGSPIIGYLVEVKRADSDNWVRCNLPQNLQKTRFEVTGLMEDTQYQFRVYAVNKIGYSDPSDVPDKHYPKDILIPPEGEHDADLRKTLILRAGVTMRLYVPVKGRPPPKITWSKPNVNLRDRIGLDIKSTDFDTFLRCENVNKYDAGKYILTLENSCGKKEYTIVVKVLDTPGPPINVTVKEISKDSAYVTWEPPIIDGGSPIINYVVQKRDAERKSWSTVTTECSKTSFRVPNLEEGKSYFFRVFAENEYGIGDPGETRDAVKASQTPGPVVDLKVRSVSKSSCSIGWKKPHSDGGSRIIGYVVDFLTEENKWQRVMKSLSLQYSAKDLTEGKEYTFRVSAENENGEGTPSEITVVARDDVVAPDLDLKGLPDLCYLAKENSNFRLKIPIKGKPAPSVSWKKGEDPLATDTRVSVESSAVNTTLIVYDCQKSDAGKYTITLKNVAGTKEGTISIKVVGKPGIPTGPIKFDEVTAEAMTLKWAPPKDDGGSEITNYILEKRDSVNNKWVTCASAVQKTTFRVTRLHEGMEYTFRVSAENKYGVGEGLKSEPIVARHPFDVPDAPPPPNIVDVRHDSVSLTWTDPKKTGGSPITGYHLEFKERNSLLWKRANKTPIRMRDFKVTGLTEGLEYEFRVMAINLAGVGKPSLPSEPVVALDPIDPPGKPEVINITRNSVTLIWTEPKYDGGHKLTGYIVEKRDLPSKSWMKANHVNVPECAFTVTDLVEGGKYEFRIRAKNTAGAISAPSESTETIICKDEYEAPTIVLDPTIKDGLTIKAGDTIVLNAISILGKPLPKSSWSKAGKDIRPSDITQITSTPTSSMLTIKYATRKDAGEYTITATNPFGTKVEHVKVTVLDVPGPPGPVEISNVSAEKATLTWTPPLEDGGSPIKSYILEKRETSRLLWTVVSEDIQSCRHVATKLIQGNEYIFRVSAVNHYGKGEPVQSEPVKMVDRFGPPGPPEKPEVSNVTKNTATVSWKRPVDDGGSEITGYHVERREKKSLRWVRAIKTPVSDLRCKVTGLQEGSTYEFRVSAENRAGIGPPSEASDSVLMKDAAYPPGPPSNPHVTDTTKKSASLAWGKPHYDGGLEITGYVVEHQKVGDEAWIKDTTGTALRITQFVVPDLQTKEKYNFRISAINDAGVGEPAVIPDVEIVEREMAPDFELDAELRRTLVVRAGLSIRIFVPIKGRPAPEVTWTKDNINLKNRANIENTESFTLLIIPECNRYDTGKFVMTIENPAGKKSGFVNVRVLDTPGPVLNLRPTDITKDSVTLHWDLPLIDGGSRITNYIVEKREATRKSYSTATTKCHKCTYKVTGLSEGCEYFFRVMAENEYGIGEPTETTEPVKASEAPSPPDSLNIMDITKSTVSLAWPKPKHDGGSKITGYVIEAQRKGSDQWTHITTVKGLECVVRNLTEGEEYTFQVMAVNSAGRSAPRESRPVIVKEQTMLPELDLRGIYQKLVIAKAGDNIKVEIPVLGRPKPTVTWKKGDQILKQTQRVNFETTATSTILNINECVRSDSGPYPLTARNIVGEVGDVITIQVHDIPGPPTGPIKFDEVSSDFVTFSWDPPENDGGVPISNYVVEMRQTDSTTWVELATTVIRTTYKATRLTTGLEYQFRVKAQNRYGVGPGITSAWIVANYPFKVPGPPGTPQVTAVTKDSMTISWHEPLSDGGSPILGYHVERKERNGILWQTVSKALVPGNIFKSSGLTDGIAYEFRVIAENMAGKSKPSKPSEPMLALDPIDPPGKPVPLNITRHTVTLKWAKPEYTGGFKITSYIVEKRDLPNGRWLKANFSNILENEFTVSGLTEDAAYEFRVIAKNAAGAISPPSEPSDAITCRDDVEAPKIKVDVKFKDTVILKAGEAFRLEADVSGRPPPTMEWSKDGKELEGTAKLEIKIADFSTNLVNKDSTRRDSGAYTLTATNPGGFAKHIFNVKVLDRPGPPEGPLAVTEVTSEKCVLSWFPPLDDGGAKIDHYIVQKRETSRLAWTNVASEVQVTKLKVTKLLKGNEYIFRVMAVNKYGVGEPLESEPVLAVNPYGPPDPPKNPEVTTITKDSMVVCWGHPDSDGGSEIINYIVERRDKAGQRWIKCNKKTLTDLRYKVSGLTEGHEYEFRIMAENAAGISAPSPTSPFYKACDTVFKPGPPGNPRVLDTSRSSISIAWNKPIYDGGSEITGYMVEIALPEEDEWQIVTPPAGLKATSYTITGLTENQEYKIRIYAMNSEGLGEPALVPGTPKAEDRMLPPEIELDADLRKVVTIRACCTLRLFVPIKGRPDPEVKWARDHGESLDKASIESASSYTLLIVGNVNRFDSGKYILTVENSSGSKSAFVNVRVLDTPGPPQDLKVKEVTKTSVTLTWDPPLLDGGSKIKNYIVEKRESTRKAYSTVATNCHKTSWKVDQLQEGCSYYFRVLAENEYGIGLPAETAESVKASERPLPPGKITLMDVTRNSVSLSWEKPEHDGGSRILGYIVEMQTKGSDKWATCATVKVTEATITGLIQGEEYSFRVSAQNEKGISDPRQLSVPVIAKDLVIPPAFKLLFNTFTVLAGEDLKVDVPFIGRPTPAVTWHKDNVPLKQTTRVNAESTENNSLLTIKDACREDVGHYVVKLTNSAGEAIETLNVIVLDKPGPPTGPVKMDEVTADSITLSWGPPKYDGGSSINNYIVEKRDTSTTTWQIVSATVARTTIKACRLKTGCEYQFRIAAENRYGKSTYLNSEPTVAQYPFKVPGPPGTPVVTLSSRDSMEVQWNEPISDGGSRVIGYHLERKERNSILWVKLNKTPIPQTKFKTTGLEEGVEYEFRVSAENIVGIGKPSKVSECYVARDPCDPPGRPEAIIVTRNSVTLQWKKPTYDGGSKITGYIVEKKELPEGRWMKASFTNIIDTHFEVTGLVEDHRYEFRVIARNAAGVFSEPSESTGAITARDEVDPPRISMDPKYKDTIVVHAGESFKVDADIYGKPIPTIQWIKGDQELSNTARLEIKSTDFATSLSVKDAVRVDSGNYILKAKNVAGERSVTVNVKVLDRPGPPEGPVVISGVTAEKCTLAWKPPLQDGGSDIINYIVERRETSRLVWTVVDANVQTLSCKVTKLLEGNEYTFRIMAVNKYGVGEPLESEPVVAKNPFVVPDAPKAPEVTTVTKDSMIVVWERPASDGGSEILGYVLEKRDKEGIRWTRCHKRLIGELRLRVTGLIENHDYEFRVSAENAAGLSEPSPPSAYQKACDPIYKPGPPNNPKVIDITRSSVFLSWSKPIYDGGCEIQGYIVEKCDVNVGEWTMCTPPTGINKTNIEVEKLLEKHEYNFRICAINKAGVGEHADVPGPIIVEEKLEAPDIDLDLELRKIINIRAGGSLRLFVPIKGRPTPEVKWGKVDGEIRDAAIIDVTSSFTSLVLDNVNRYDSGKYTLTLENSSGTKSAFVTVRVLDTPSPPVNLKVTEITKDSVSITWEPPLLDGGSKIKNYIVEKREATRKSYAAVVTNCHKNSWKIDQLQEGCSYYFRVTAENEYGIGLPAQTADPIKVAEVPQPPGKITVDDVTRNSVSLSWTKPEHDGGSKIIQYIVEMQAKHSEKWSECARVKSLQAVITNLTQGEEYLFRVVAVNEKGRSDPRSLAVPIVAKDLVIEPDVKPAFSSYSVQVGQDLKIEVPISGRPKPTITWTKDGLPLKQTTRINVTDSLDLTTLSIKETHKDDGGQYGITVANVVGQKTASIEIVTLDKPDPPKGPVKFDDVSAESITLSWNPPLYTGGCQITNYIVQKRDTTTTVWDVVSATVARTTLKVTKLKTGTEYQFRIFAENRYGQSFALESDPIVAQYPYKEPGPPGTPFATAISKDSMVIQWHEPVNNGGSPVIGYHLERKERNSILWTKVNKTIIHDTQFKAQNLEEGIEYEFRVYAENIVGVGKASKNSECYVARDPCDPPGTPEPIMVKRNEITLQWTKPVYDGGSMITGYIVEKRDLPDGRWMKASFTNVIETQFTVSGLTEDQRYEFRVIAKNAAGAISKPSDSTGPITAKDEVELPRISMDPKFRDTIVVNAGETFRLEADVHGKPLPTIEWLRGDKEIEESARCEIKNTDFKALLIVKDAIRIDGGQYILRASNVAGSKSFPVNVKVLDRPGPPEGPVQVTGVTSEKCSLTWSPPLQDGGSDISHYVVEKRETSRLAWTVVASEVVTNSLKVTKLLEGNEYVFRIMAVNKYGVGEPLESAPVLMKNPFVLPGPPKSLEVTNIAKDSMTVCWNRPDSDGGSEIIGYIVEKRDRSGIRWIKCNKRRITDLRLRVTGLTEDHEYEFRVSAENAAGVGEPSPATVYYKACDPVFKPGPPTNAHIVDTTKNSITLAWGKPIYDGGSEILGYVVEICKADEEEWQIVTPQTGLRVTRFEISKLTEHQEYKIRVCALNKVGLGEATSVPGTVKPEDKLEAPELDLDSELRKGIVVRAGGSARIHIPFKGRPMPEITWSREEGEFTDKVQIEKGVNYTQLSIDNCDRNDAGKYILKLENSSGSKSAFVTVKVLDTPGPPQNLAVKEVRKDSAFLVWEPPIIDGGAKVKNYVIDKRESTRKAYANVSSKCSKTSFKVENLTEGAIYYFRVMAENEFGVGVPVETVDAVKAAEPPSPPGKVTLTDVSQTSASLMWEKPEHDGGSRVLGYVVEMQPKGTEKWSIVAESKVCNAVVTGLSSGQEYQFRVKAYNEKGKSDPRVLGVPVIAKDLTIQPSLKLPFNTYSIQAGEDLKIEIPVIGRPRPNISWVKDGEPLKQTTRVNVEETATSTVLHIKEGNKDDFGKYTVTATNSAGTATENLSVIVLEKPGPPVGPVRFDEVSADFVVISWEPPAYTGGCQISNYIVEKRDTTTTTWHMVSATVARTTIKITKLKTGTEYQFRIFAENRYGKSAPLDSKAVIVQYPFKEPGPPGTPFVTSISKDQMLVQWHEPVNDGGTKIIGYHLEQKEKNSILWVKLNKTPIQDTKFKTTGLDEGLEYEFKVSAENIVGIGKPSKVSECFVARDPCDPPGRPEAIVITRNNVTLKWKKPAYDGGSKITGYIVEKKDLPDGRWMKASFTNVLETEFTVSGLVEDQRYEFRVIARNAAGNFSEPSDSSGAITARDEIDAPNASLDPKYKDVIVVHAGETFVLEADIRGKPIPDVVWSKDGKELEETAARMEIKSTIQKTTLVVKDCIRTDGGQYILKLSNVGGTKSIPITVKVLDRPGSPEGPLKVTGVTAEKCYLAWNPPLQDGGANISHYIIEKRETSRLSWTQVSTEVQALNYKVTKLLPGNEYIFRVMAVNKYGIGEPLESGPVTACNPYKPPGPPSTPEVSAITKDSMVVTWARPVDDGGTEIEGYILEKRDKEGVRWTKCNKKTLTDLRLRVTGLTEGHSYEFRVAAENAAGVGEPSEPSVFYRACDALYPPGPPSNPKVTDTSRSSVSLAWSKPIYDGGAPVKGYVVEVKEAAADEWTTCTPPTGLQGKQFTVTKLKENTEYNFRICAINSEGVGEPATLPGSVVAQERIEPPEIELDADLRKVVVLRASATLRLFVTIKGRPEPEVKWEKAEGILTDRAQIEVTSSFTMLVIDNVTRFDSGRYNLTLENNSGSKTAFVNVRVLDSPSAPVNLTIREVKKDSVTLSWEPPLIDGGAKITNYIVEKRETTRKAYATITNNCTKTTFRIENLQEGCSYYFRVLASNEYGIGLPAETTEPVKVSEPPLPPGRVTLVDVTRNTATIKWEKPESDGGSKITGYVVEMQTKGSEKWSTCTQVKTLEATISGLTAGEEYVFRVAAVNEKGRSDPRQLGVPVIARDIEIKPSVELPFHTFNVKAREQLKIDVPFKGRPQATVNWRKDGQTLKETTRVNVSSSKTVTSLSIKEASKEDVGTYELCVSNSAGSITVPITIIVLDRPGPPGPIRIDEVSCDSITISWNPPEYDGGCQISNYIVEKKETTSTTWHIVSQAVARTSIKIVRLTTGSEYQFRVCAENRYGKSSYSESSAVVAEYPFSPPGPPGTPKVVHATKSTMLVTWQVPVNDGGSRVIGYHLEYKERSSILWSKANKILIADTQVKVSGLDEGLMYEYRVYAENIAGIGKCSKSCEPVPARDPCDPPGQPEVTNITRKSVSLKWSKPHYDGGAKITGYIVERRELPDGRWLKCNYTNIQETYFEVTELTEDQRYEFRVFARNAADSVSEPSESTGPIIVKDDVEPPRVMMDVKFRDVIVVKAGEVLKINADIAGRPLPVISWAKDGIEIEERARTEIISTDNHTLLTVKDCIRRDTGQYVLTLKNVAGTRSVAVNCKVLDKPGPPAGPLEINGLTAEKCSLSWGRPQEDGGADIDYYHRKKRETSHLAWTICEGELQMTSCKVTKLLKGNEYIFRVTGVNKYGVGEPLESVAIKALDPFTVPSPPTSLEITSVTKESMTLCWSRPESDGGSEISGYIIERREKNSLRWVRVNKKPVYDLRVKSTGLREGCEYEYRVYAENAAGLSLPSETSPLIRAEDPVFLPSPPSKPKIVDSGKTTITIAWVKPLFDGGAPITGYTVEYKKSDDTDWKTSIQSLRGTEYTISGLTTGAEYVFRVKSVNKVGASDPSDSSDPQIAKEREEEPLFDIDSEMRKTLIVKAGASFTMTVPFRGRPVPNVLWSKPDTDLRTRAYVDTTDSRTSLTIENANRNDSGKYTLTIQNVLSAASLTLVVKVLDTPGPPTNITVQDVTKESAVLSWDVPENDGGAPVKNYHIEKREASKKAWVSVTNNCNRLSYKVTNLQEGAIYYFRVSGENEFGVGIPAETKEGVKITEKPSPPEKLGVTSISKDSVSLTWLKPEHDGGSRIVHYVVEALEKGQKNWVKCAVAKSTHHVVSGLRENSEYFFRVFAENQAGLSDPRELLLPVLIKEQLEPPEIDMKNFPSHTVYVRAGSNLKVDIPISGKPLPKVTLSRDGVPLKATMRFNTEITAENLTINLKESVTADAGRYEITAANSSGTTKAFINIVVLDRPGPPTGPVVISDITEESVTLKWEPPKYDGGSQVTNYILLKRETSTAVWTEVSATVARTMMKVMKLTTGEEYQFRIKAENRFGISDHIDSACVTVKLPYTTPGPPSTPWVTNVTRESITVGWHEPVSNGGSAVVGYHLEMKDRNSILWQKANKLVIRTTHFKVTTISAGLIYEFRVYAENAAGVGKPSHPSEPVLAIDACEPPRNVRITDISKNSVSLSWQQPAFDGGSKITGYIVERRDLPDGRWTKASFTNVTETQFTISGLTQNSQYEFRVFARNAVGSISNPSEVVGPITCIDSYGGPVIDLPLEYTEVVKYRAGTSVKLRAGISGKPAPTIEWYKDDKELQTNALVCVENTTDLASILIKDADRLNSGCYELKLRNAMASASATIRVQILDKPGPPGGPIEFKTVTAEKITLLWRPPADDGGAKITHYIVEKRETSRVVWSMVSEHLEECIITTTKIIKGNEYIFRVRAVNKYGIGEPLESDSVVAKNAFVTPGPPGIPEVTKITKNSMTVVWSRPIADGGSDISGYFLEKRDKKSLGWFKVLKETIRDTRQKVTGLTENSDYQYRVCAVNAAGQGPFSEPSEFYKAADPIDPPGPPAKIRIADSTKSSITLGWSKPVYDGGSAVTGYVVEIRQGEEEEWTTVSTKGEVRTTEYVVSNLKPGVNYYFRVSAVNCAGQGEPIEMNEPVQAKDILEAPEIDLDVALRTSVIAKAGEDVQVLIPFKGRPPPTVTWRKDEKNLGSDARYSIENTDSSSLLTIPQVTRNDTGKYILTIENGVGEPKSSTVSVKVLDTPAACQKLQVKHVSRGTVTLLWDPPLIDGGSPIINYVIEKRDATKRTWSVVSHKCSSTSFKLIDLSEKTPFFFRVLAENEIGIGEPCETTEPVKAAEVPAPIRDLSMKDSTKTSVILSWTKPDFDGGSVITEYVVERKGKGEQTWSHAGISKTCEIEVSQLKEQSVLEFRVFAKNEKGLSDPVTIGPITVKELIITPEVDLSDIPGAQVTVRIGHNVHLELPYKGKPKPSISWLKDGLPLKESEFVRFSKTENKITLSIKNAKKEHGGKYTVILDNAVCRIAVPITVITLGPPSKPKGPIRFDEIKADSVILSWDVPEDNGGGEITCYSIEKRETSQTNWKMVCSSVARTTFKVPNLVKDAEYQFRVRAENRYGVSQPLVSSIIVAKHQFRIPGPPGKPVIYNVTSDGMSLTWDAPVYDGGSEVTGFHVEKKERNSILWQKVNTSPISGREYRATGLVEGLDYQFRVYAENSAGLSSPSDPSKFTLAVSPVDPPGTPDYIDVTRETITLKWNPPLRDGGSKIVGYSIEKRQGNERWVRCNFTDVSECQYTVTGLSPGDRYEFRIIARNAVGTISPPSQSSGIIMTRDENVPPIVEFGPEYFDGLIIKSGESLRIKALVQGRPVPRVTWFKDGVEIEKRMNMEITNVLGSTSLFVRDATRDHRGVYTVEAKNASGSAKAEIKVKVQDTPGKVVGPIRFTNITGEKMTLWWDAPLNDGCAPITHYIIEKRETSRLAWALIEDKCEAQSYTAIKLINGNEYQFRVSAVNKFGVGRPLDSDPVVAQIQYTVPDAPGIPEPSNITGNSITLTWARPESDGGSEIQQYILERREKKSTRWVKVISKRPISETRFKVTGLTEGNEYEFHVMAENAAGVGPASGISRLIKCREPVNPPGPPTVVKVTDTSKTTVSLEWSKPVFDGGMEIIGYIIEMCKTDLGDWHKVNAEACVKTRYTVTDLQAGEEYKFRVSAINGAGKGDSCEVTGTIKAVDRLTAPELDIDANFKQTHVVRAGASIRLFIAYQGRPTPTAVWSKPDSNLSLRADIHTTDSFSTLTVENCNRNDAGKYTLTVENNSGSKSITFTVKVLDTPGPPGPITFKDVTRGSATLMWDAPLLDGGARIHHYVVEKREASRRSWQVISEKCTRQIFKVNDLAEGVPYYFRVSAVNEYGVGEPYEMPEPIVATEQPAPPRRLDVVDTSKSSAVLAWLKPDHDGGSRITGYLLEMRQKGSDLWVEAGHTKQLTFTVERLVEKTEYEFRVKAKNDAGYSEPREAFSSVIIKEPQIEPTADLTGITNQLITCKAGSPFTIDVPISGRPAPKVTWKLEEMRLKETDRVSITTTKDRTTLTVKDSMRGDSGRYFLTLENTAGVKTFSVTVVVIGRPGPVTGPIEVSSVSAESCVLSWGEPKDGGGTEITNYIVEKRESGTTAWQLVNSSVKRTQIKVTHLTKYMEYSFRVSSENRFGVSKPLESAPIIAEHPFVPPSAPTRPEVYHVSANAMSIRWEEPYHDGGSKIIGYWVEKKERNTILWVKENKVPCLECNYKVTGLVEGLEYQFRTYALNAAGVSKASEASRPIMAQNPVDAPGRPEVTDVTRSTVSLIWSAPAYDGGSKVVGYIIERKPVSEVGDGRWLKCNYTIVSDNFFTVTALSEGDTYEFRVLAKNAAGVISKGSESTGPVTCRDEYAPPKAELDARLHGDLVTIRAGSDLVLDAAVGGKPEPKIIWTKGDKELDLCEKVSLQYTGKRATAVIKFCDRSDSGKYTLTVKNASGTKAVSVMVKVLDSPGPCGKLTVSRVTQEKCTLAWSLPQEDGGAEITHYIVERRETSRLNWVIVEGECPTLSYVVTRLIKNNEYIFRVRAVNKYGPGVPVESEPIVARNSFTIPSPPGIPEEVGTGKEHIIIQWTKPESDGGNEISNYLVDKREKESLRWTRVNKDYVVYDTRLKVTSLMEGCDYQFRVTAVNAAGNSEPSERSNFISCREPSYTPGPPSAPRVVDTTKHSISLAWTKPMYDGGTDIVGYVLEMQEKDTDQWYRVHTNATIRNTEFTVPDLKMGQKYSFRVAAVNVKGMSEYSESIAEIEPVERIEIPDLELADDLKKTVTIRAGASLRLMVSVSGRPPPVITWSKQGIDLASRAIIDTTESYSLLIVDKVNRYDAGKYTIEAENQSGKKSATVLVKVYDTPGPCPSVKVKEVSRDSVTITWEIPTIDGGAPINNYIVEKREAAMRAFKTVTTKCSKTLYRISGLVEGTMHYFRVLPENIYGIGEPCETSDAVLVSEVPLVPAKLEVVDVTKSTVTLAWEKPLYDGGSRLTGYVLEACKAGTERWMKVVTLKPTVLEHTVTSLNEGEQYLFRIRAQNEKGVSEPRETVTAVTVQDLRVLPTIDLSTMPQKTIHVPAGRPVELVIPIAGRPPPAASWFFAGSKLRESERVTVETHTKVAKLTIRETTIRDTGEYTLELKNVTGTTSETIKVIILDKPGPPTGPIKIDEIDATSITISWEPPELDGGAPLSGYVVEQRDAHRPGWLPVSESVTRSTFKFTRLTEGNEYVFRVAATNRFGIGSYLQSEVIECRSSIRIPGPPETLQIFDVSRDGMTLTWYPPEDDGGSQVTGYIVERKEVRADRWVRVNKVPVTMTRYRSTGLTEGLEYEHRVTAINARGSGKPSRPSKPIVAMDPIAPPGKPQNPRVTDTTRTSVSLAWSVPEDEGGSKVTGYLIEMQKVDQHEWTKCNTTPTKIREYTLTHLPQGAEYRFRVLACNAGGPGEPAEVPGTVKVTEMLEYPDYELDERYQEGIFVRQGGVIRLTIPIKGKPFPICKWTKEGQDISKRAMIATSETHTELVIKEADRGDSGTYDLVLENKCGKKAVYIKVRVIGSPNSPEGPLEYDDIQVRSVRVSWRPPADDGGADILGYILERREVPKAAWYTIDSRVRGTSLVVKGLKENVEYHFRVSAENQFGISKPLKSEEPVTPKTPLNPPEPPSNPPEVLDVTKSSVSLSWSRPKDDGGSRVTGYYIERKETSTDKWVRHNKTQITTTMYTVTGLVPDAEYQFRIIAQNDVGLSETSPASEPVVCKDPFDKPSQPGELEILSISKDSVTLQWEKPECDGGKEILGYWVEYRQSGDSAWKKSNKERIKDKQFTIGGLLEATEYEFRVFAENETGLSRPRRTAMSIKTKLTSGEAPGIRKEMKDVTTKLGEAAQLSCQIVGRPLPDIKWYRFGKELIQSRKYKMSSDGRTHTLTVMTEEQEDEGVYTCIATNEVGEVETSSKLLLQATPQFHPGYPLKEKYYGAVGSTLRLHVMYIGRPVPAMTWFHGQKLLQNSENITIENTEHYTHLVMKNVQRKTHAGKYKVQLSNVFGTVDAILDVEIQDKPDKPTGPIVIEALLKNSAVISWKPPADDGGSWITNYVVEKCEAKEGAEWQLVSSAISVTTCRIVNLTENAGYYFRVSAQNTFGISDPLEVSSVVIIKSPFEKPGAPGKPTITAVTKDSCVVAWKPPASDGGAKIRNYYLEKREKKQNKWISVTTEEIRETVFSVKNLIEGLEYEFRVKCENLGGESEWSEISEPITPKSDVPIQAPHFKEELRNLNVRYQSNATLVCKVTGHPKPIVKWYRQGKEIIADGLKYRIQEFKGGYHQLIIASVTDDDATVYQVRATNQGGSVSGTASLEVEVPAKIHLPKTLEGMGAVHALRGEVVSIKIPFSGKPDPVITWQKGQDLIDNNGHYQVIVTRSFTSLVFPNGVERKDAGFYVVCAKNRFGIDQKTVELDVADVPDPPRGVKVSDASRDSVNLTWTEPASDGGSKITNYIVEKCATTAERWLRVGQARETRYTVINLFGKTSYQFRVIAENKFGLSKPSEPSEPTITKEDKTRAMNYDEEVDETREVSMTKASHSSTKELYEKYMIAEDLGRGEFGIVHRCVETSSKKTYMAKFVKVKGTDQVLVKKEISILNIARHRNILHLHESFESMEELVMIFEFISGLDIFERINTSAFELNEREIVSYVHQVCEALQFLHSHNIGHFDIRPENIIYQTRRSSTIKIIEFGQARQLKPGDNFRLLFTAPEYYAPEVHQHDVVSTATDMWSLGTLVYVLLSGINPFLAETNQQIIENIMNAEYTFDEEAFKEISIEAMDFVDRLLVKERKSRMTASEALQHPWLKQKIERVSTKVIRTLKHRRYYHTLIKKDLNMVVSAARISCGGAIRSQKGVSVAKVKVASIEIGPVSGQIMHAVGEEGGHVKYVCKIENYDQSTQVTWYFGVRQLENSEKYEITYEDGVAILYVKDITKLDDGTYRCKVVNDYGEDSSYAELFVKGVREVYDYYCRRTMKKIKRRTDTMRLLERPPEFTLPLYNKTAYVGENVRFGVTITVHPEPHVTWYKSGQKIKPGDNDKKYTFESDKGLYQLTINSVTTDDDAEYTVVARNKYGEDSCKAKLTVTLHPPPTDSTLRPMFKRLLANAECQEGQSVCFEIRVSGIPPPTLKWEKDGQPLSLGPNIEIIHEGLDYYALHIRDTLPEDTGYYRVTATNTAGSTSCQAHLQVERLRYKKQEFKSKEEHERHVQKQIDKTLRMAEILSGTESVPLTQVAKEALREAAVLYKPAVSTKTVKGEFRLEIEEKKEERKLRMPYDVPEPRKYKQTTIEEDQRIKQFVPMSDMKWYKKIRDQYEMPGKLDRVVQKRPKRIRLSRWEQFYVMPLPRITDQYRPKWRIPKLSQDDLEIVRPARRRTPSPDYDFYYRPRRRSLGDISDEELLLPIDDYLAMKRTEEERLRLEEELELGFSASPPSRSPPHFELSSLRYSSPQAHVKVEETRKNFRYSTYHIPTKAEASTSYAELRERHAQAAYRQPKQRQRIMAEREDEELLRPVTTTQHLSEYKSELDFMSKEEKSRKKSRRQREVTEITEIEEEYEISKHAQRESSSSASRLLRRRRSLSPTYIELMRPVSELIRSRPQPAEEYEDDTERRSPTPERTRPRSPSPVSSERSLSRFERSARFDIFSRYESMKAALKTQKTSERKYEVLSQQPFTLDHAPRITLRMRSHRVPCGQNTRFILNVQSKPTAEVKWYHNGVELQESSKIHYTNTSGVLTLEILDCHTDDSGTYRAVCTNYKGEASDYATLDVTGGDYTTYASQRRDEEVPRSVFPELTRTEAYAVPSFKKTSEMEASSSVREVKSQMTETRESLSSYEHSASAEMKSAALEEKSLEEKSTTRKIKTTLAARILTKPRSMTVYEGESARFSCDTDGEPVPTVTWLRKGQVLSTSARHQVTTTKYKSTFEISSVQASDEGNYSVVVENSEGKQEAEFTLTIQKARVTEKAVTSPPRVKSPEPRVKSPEAVKSPKRVKSPEPSHPKAVSPTETKPTPREKVQHLPVSAPPKITQFLKAEASKEIAKLTCVVESSVLRAKEVTWYKDGKKLKENGHFQFHYSADGTYELKINNLTESDQGEYVCEISGEGGTSKTNLQFMGQAFKSIHEKVSKISETKKSDQKTTESTVTRKTEPKAPEPISSKPVIVTGLQDTTVSSDSVAKFAVKATGEPRPTAIWTKDGKAITQGGKYKLSEDKGGFFLEIHKTDTSDSGLYTCTVKNSAGSVSSSCKLTIKAIKDTEAQKVSTQKTSEITPQKKAVVQEEISQKALRSEEIKMSEAKSQEKLALKEEASKVLISEEVKKSAATSLEKSIVHEEITKTSQASEEVRTHAEIKAFSTQMSINEGQRLVLKANIAGATDVKWVLNGVELTNSEEYRYGVSGSDQTLTIKQASHRDEGILTCISKTKEGIVKCQYDLTLSKELSDAPAFISQPRSQNINEGQNVLFTCEISGEPSPEIEWFKNNLPISISSNVSISRSRNVYSLEIRNASVSDSGKYTIKAKNFRGQCSATASLMVLPLVEEPSREVVLRTSGDTSLQGSFSSQSVQMSASKQEASFSSFSSSSASSMTEMKFASMSAQSMSSMQESFVEMSSSSFMGISNMTQLESSTSKMLKAGIRGIPPKIEALPSDISIDEGKVLTVACAFTGEPTPEVTWSCGGRKIHSQEQGRFHIENTDDLTTLIIMDVQKQDGGLYTLSLGNEFGSDSATVNIHIRSI

SEQ ID NO: 3 - DNA, 21 bp, Danio rerio
agggacactcagagaccatag

SEQ ID NO: 4 - DNA, 40 bp, Danio rerio
taatacgactcactataggggtctgaggatactcgccttc

SEQ ID NO: 5 - DNA, 27 bp, Danio rerio
tttgaaccacttgaaggtcacaccagg

SEQ ID NO: 6 - DNA, 30 bp, Danio rerio
gctaagaatgactatggagttgccacaagc

SEQ ID NO: 7 - DNA, 27 bp, Danio rerio
tgaaccacttgaaggtcacaccaggag

SEQ ID NO: 8 - DNA, 41 bp, Danio rerio
taatacgactcactatagggagggacactcagagaccatag

SEQ ID NO: 9 - DNA, 40 bp, Danio rerio; identical to SEQ ID NO: 4

SEQ ID NO: 10 - DNA, 21 bp, Danio rerio
agggacactcagagaccatag

SEQ ID NO: 11 - DNA, 22 bp, Danio rerio
ggcaatgttactctctgttgag
